(19) United States
(12) Patent Application Publication
(10) Pub. No.: US 2007/0270360 A1
(43) Pub. Date: Nov. 22, 2007

(54) Rna Interference Mediated Inhibition of Severe Acute Respiratory Syndrome (Sars) Gene Expression Using Short Interfering Nucleic Acid

(75) Inventors: James McSwiggen, Boulder, CO (US); Bharat Chowrira, San Francisco, CA (US); Peter Haeberli, Berthoud, CO (US)

Correspondence Address: MCDONNELL, BOEHNEN, HULBERT AND BERGHOFF, LLP, 300 SOUTH WACKER DRIVE, SUITE 3100, CHICAGO, IL, 60606, US

(73) Assignee: SIRNA THERAPEUTICS, INC., BOULDER, CO (US)

(21) Appl. No.: 10/553,729

(22) PCT Filed: Apr. 13, 2004
(86) PCT No.: PCT/US04/11320

§ 371 Date: Mar. 6, 2007

Related U.S. Application Data
(63) Continuation-in-part of application No. 10/757,803, filed on Jan. 14, 2004.
Application No. 10/757,803 is a continuation-in-part of application No. 10/720,448, filed on Nov. 24, 2003, now abandoned.
Application No. 10/720,448 is a continuation-in-part of application No. 10/693,059, filed on Oct. 23, 2003, now abandoned.
Application No. 10/693,059 is a continuation-in-part of application No. 10/444,853, filed on May 23, 2003.
Application No. PCT/US04/11320 is a continuation-in-part of application No. 10/427,160, filed on Apr. 30, 2003.
(60) Provisional application No. 60/462,874, filed on Apr. 15, 2003.

(51) Int. Cl. A61K 31/713; A61P 11/00; C07H 21/02

(52) U.S. Cl. 514/44; 536/24.5

(57) ABSTRACT

The present invention concerns methods and reagents useful in modulating gene expression in a variety of applications, including use in therapeutic, diagnostic, target validation, and genomic discovery applications. Specifically, the invention relates to synthetic chemically modified small nucleic acid molecules, such as short interfering nucleic acid (siNA), short interfering RNA (siRNA), double-stranded RNA (dsRNA), micro-RNA (miRNA), and short hairpin RNA (shRNA) molecules capable of mediating RNA interference (RNAi) against target nucleic acid sequences. The small nucleic acid molecules are useful in the treatment of any disease or condition that responds to modulation of gene expression or activity in a cell, tissue, or organism.

[0001] This application claims the benefit of U.S. Provisional Application No. 60/462,874, filed Apr. 15, 2003, and is a continuation-in-part of U.S. patent application Ser. No. 10/757,803, filed Jan. 14, 2004, which is a continuation-in-part of U.S. patent application Ser. No. 10/720,448, filed Nov. 24, 2003, which is a continuation-in-part of U.S. patent application Ser. No. 10/693,059, filed Oct. 23, 2003, which is a continuation-in-part of U.S. patent application Ser. No. 10/444,853, filed May 23, 2003. This application is also a continuation-in-part of U.S. patent application Ser. No. 10/427,160, filed Apr. 30, 2003.

[0002] Reference is made to International Patent Application No. PCT/US03/05346, filed Feb. 20, 2003, and International Patent Application No. PCT/US03/05028, filed Feb. 20, 2003, both of which claim the benefit of U.S. Provisional Application No. 60/358,580 filed Feb. 20, 2002, U.S. Provisional Application No. 60/363,124 filed Mar. 11, 2002, U.S. Provisional Application No. 60/386,782 filed Jun. 6, 2002, U.S. Provisional Application No. 60/406,784 filed Aug. 29, 2002, U.S. Provisional Application No. 60/408,378 filed Sep. 5, 2002, U.S. Provisional Application No. 60/409,293 filed Sep. 9, 2002, and U.S. Provisional Application No. 60/440,129 filed Jan. 15, 2003. Reference is also made to International Patent Application No. PCT/US02/15876 filed May 17, 2002.

[0003] All the listed applications are hereby incorporated by reference herein in their entireties, including the drawings.

### FIELD OF THE INVENTION

[0004] The present invention concerns compounds, compositions, and methods for the study, diagnosis, and treatment of diseases and conditions that respond to the modulation of severe acute respiratory syndrome (SARS) associated cornavirus (SARS virus) gene expression and/or activity. The present invention also concerns compounds, compositions, and methods relating to conditions and diseases that respond to the modulation of expression and/or activity of genes involved in SARS virus pathways of gene expression, including cellular genes that are involved in SARS virus infection. Specifically, the invention comprises small nucleic acid molecules, such as short interfering nucleic acid (siNA), short interfering RNA (siRNA), double-stranded RNA (dsRNA), micro-RNA (miRNA), and short hairpin RNA (shRNA) molecules capable of mediating RNA interference (RNAi) against severe acute respiratory syndrome (SARS) associated cornavirus gene expression.

### BACKGROUND OF THE INVENTION

[0005] The following is a discussion of relevant art pertaining to RNAi. The discussion is provided only for understanding of the invention that follows. The summary is not an admission that any of the work described below is prior art to the claimed invention.

[0006] RNA interference refers to the process of sequence-specific post-transcriptional gene silencing in animals mediated by short interfering RNAs (siRNAs) (Zamore et al., 2000, Cell, 101, 25-33; Fire et al., 1998, Nature, 391, 806; Hamilton et al., 1999, Science, 286, 950-951; Lin et al., 1999, Nature, 402, 128-129; Sharp, 1999, Genes & Dev., 13:139-141; and Strauss, 1999, Science, 286, 886). The corresponding process in plants (Heifetz et al., International PCT Publication No. WO 99/61631) is commonly referred to as post-transcriptional gene silencing or RNA silencing and is also referred to as quelling in fungi. The process of post-transcriptional gene silencing is thought to be an evolutionarily-conserved cellular defense mechanism used to prevent the expression of foreign genes and is commonly shared by diverse flora and phyla (Fire et al., 1999, Trends Genet., 15, 358). Such protection from foreign gene expression may have evolved in response to the production of double-stranded RNAs (dsRNAs) derived from viral infection or from the random integration of transposon elements into a host genome via a cellular response that specifically destroys homologous single-stranded RNA or viral genomic RNA. The presence of dsRNA in cells triggers the RNAi response through a mechanism that has yet to be fully characterized. This mechanism appears to be different from other known mechanisms involving double stranded RNA-specific ribonucleases, such as the interferon response that results from dsRNA-mediated activation of protein kinase PKR and 2′,5′-oligoadenylate synthetase resulting in non-specific cleavage of mRNA by ribonuclease L (see for example U.S. Pat. Nos. 6,107,094; 5,898,031; Clemens et al., 1997, J Interferon & Cytokine Res., 17, 503-524; Adah et al., 2001, Curr. Med. Chem., 8, 1189).

[0007] The presence of long dsRNAs in cells stimulates the activity of a ribonuclease III enzyme referred to as dicer (Bass, 2000, Cell, 101, 235; Zamore et al., 2000, Cell, 101, 25-33; Hammond et al., 2000, Nature, 404, 293). Dicer is involved in the processing of the dsRNA into short pieces of dsRNA known as short interfering RNAs (siRNAs) (Zamore et al., 2000, Cell, 101, 25-33; Bass, 2000, Cell, 101, 235; Berstein et al., 2001, Nature, 409, 363). Short interfering RNAs derived from dicer activity are typically about 21 to about 23 nucleotides in length and comprise about 19 base pair duplexes (Zamore et al., 2000, Cell, 101, 25-33; Elbashir et al., 2001, Genes Dev., 15, 188). Dicer has also been implicated in the excision of 21 and 22-nucleotide small temporal RNAs (stRNAs) from precursor RNA of conserved structure that are implicated in translational control (Hutvagner et al., 2001, Science, 293, 834). The RNAi response also features an endonuclease complex, commonly referred to as an RNA-induced silencing complex (RISC), which mediates cleavage of single-stranded RNA having sequence complementary to the antisense strand of the siRNA duplex. Cleavage of the target RNA takes place in the middle of the region complementary to the antisense strand of the siRNA duplex (Elbashir et al., 2001, Genes Dev., 15, 188).

[0008] RNAi has been studied in a variety of systems. Fire et al., 1998, Nature, 391, 806, were the first to observe RNAi in C. elegans. Bahramian and Zarbl, 1999, Molecular and Cellular Biology, 19, 274-283 and Wianny and Goetz, 1999, Nature Cell Biol., 2, 70, describe RNAi mediated by dsRNA in mammalian systems. Hammond et al., 2000, Nature, 404, 293, describe RNAi in Drosophila cells transfected with dsRNA. Elbashir et al., 2001, Nature, 411, 494 and Tuschl et al., International PCT Publication No. WO 01/75164, describe RNAi induced by introduction of duplexes of synthetic 21-nucleotide RNAs in cultured mammalian cells including human embryonic kidney and HeLa cells. Recent work in Drosophila embryonic lysates (Elbashir et al., 2001, EMBO J, 20, 6877 and Tuschl et al., International PCT Publication No. WO 01/75164) has revealed certain requirements for siRNA length, structure, chemical composition, and sequence that are essential to mediate efficient RNAi activity. These studies have shown that 21-nucleotide siRNA duplexes are most active when containing 3′-terminal dinucleotide overhangs. Furthermore, complete substitution of one or both siRNA strands with 2′-deoxy (2′-H) or 2′-O-methyl nucleotides abolishes RNAi activity, whereas substitution of the 3′-terminal siRNA overhang nucleotides with 2′-deoxy nucleotides (2′-H) was shown to be tolerated. Single mismatch sequences in the center of the siRNA duplex were also shown to abolish RNAi activity. In addition, these studies also indicate that the position of the cleavage site in the target RNA is defined by the 5′-end of the siRNA guide sequence rather than the 3′-end of the guide sequence (Elbashir et al., 2001, EMBO J, 20, 6877). Other studies have indicated that a 5′-phosphate on the target-complementary strand of a siRNA duplex is required for siRNA activity and that ATP is utilized to maintain the 5′-phosphate moiety on the siRNA (Nykanen et al., 2001, Cell, 107, 309).

[0009] Studies have shown that replacing the 3′-terminal nucleotide overhanging segments of a 21-mer siRNA duplex having two-nucleotide 3′-overhangs with deoxyribonucleotides does not have an adverse effect on RNAi activity. Replacing up to four nucleotides on each end of the siRNA with deoxyribonucleotides has been reported to be well tolerated, whereas complete substitution with deoxyribonucleotides results in no RNAi activity (Elbashir et al., 2001, EMBO J., 20, 6877 and Tuschl et al., International PCT Publication No. WO 01/75164). In addition, Elbashir et al., supra, also report that substitution of siRNA with 2′-O-methyl nucleotides completely abolishes RNAi activity. Li et al., International PCT Publication No. WO 00/44914, and Beach et al., International PCT Publication-No. WO 01/68836 preliminarily suggest that siRNA may include modifications to either the phosphate-sugar backbone or the nucleoside to include at least one of a nitrogen or sulfur heteroatom, however, neither application postulates to what extent such modifications would be tolerated in siRNA molecules, nor provides any further guidance or examples of such modified siRNA. Kreutzer et al., Canadian Patent Application No. 2,359,180, also describe certain chemical modifications for use in dsRNA constructs in order to counteract activation of double-stranded RNA-dependent protein kinase PKR, specifically 2′-amino or 2′-O-methyl nucleotides, and nucleotides containing a 2′-O or 4′-C methylene bridge. However, Kreutzer et al. similarly fails to provide examples or guidance as to what extent these modifications would be tolerated in dsRNA molecules.

[0010] Parrish et al., 2000, Molecular Cell, 6, 1077-1087, tested certain chemical modifications targeting the unc-22 gene in C. elegans using long (>25 nt) siRNA transcripts. The authors describe the introduction of thiophosphate residues into these siRNA transcripts by incorporating thiophosphate nucleotide analogs with T7 and T3 RNA polymerase and observed that RNAs with two phosphorothioate modified bases also had substantial decreases in effectiveness as RNAi. Further, Parrish et al. reported that phosphorothioate modification of more than two residues greatly destabilized the RNAs in vitro such that interference activities could not be assayed. Id. at 1081. The authors also tested certain modifications at the 2′-position of the nucleotide sugar in the long siRNA transcripts and found that substituting deoxynucleotides for ribonucleotides produced a substantial decrease in interference activity, especially in the case of Uridine to Thymidine and/or Cytidine to deoxy-Cytidine substitutions. Id. In addition, the authors tested certain base modifications, including substituting, in sense and antisense strands of the siRNA, 4-thiouracil, 5-bromouracil, 5-iodouracil, and 3-(aminoallyl)uracil for uracil, and inosine for guanosine. Whereas 4-thiouracil and 5-bromouracil substitution appeared to be tolerated, Parrish reported that inosine produced a substantial decrease in interference activity when incorporated in either strand. Parrish also reported that incorporation of 5-iodouracil and 3-(aminoallyl)uracil in the antisense strand resulted in a substantial decrease in RNAi activity as well.

[0011] The use of longer dsRNA has been described. For example, Beach et al., International PCT Publication No. WO 01/68836, describes specific methods for attenuating gene expression using endogenously-derived dsRNA. Tuschl et al., International PCT Publication No. WO 01/75164, describe a Drosophila in vitro RNAi system and the use of specific siRNA molecules for certain functional genomic and certain therapeutic applications; although Tuschl, 2001, Chem. Biochem., 2, 239-245, doubts that RNAi can be used to cure genetic diseases or viral infection due to the danger of activating interferon response. Li et al., International PCT Publication No. WO 00/44914, describe the use of specific long (141 bp-488 bp) enzymatically synthesized or vector expressed dsRNAs for attenuating the expression of certain target genes. Zernicka-Goetz et al., International PCT Publication No. WO 01/36646, describe certain methods for inhibiting the expression of particular genes in mammalian cells using certain long (550 bp-714 bp), enzymatically synthesized or vector expressed dsRNA molecules. Fire et al., International PCT Publication No. WO 99/32619, describe particular methods for introducing certain long dsRNA molecules into cells for use in inhibiting gene expression in nematodes. Plaetinck et al., International PCT Publication No. WO 00/01846, describe certain methods for identifying specific genes responsible for conferring a particular phenotype in a cell using specific long dsRNA molecules. Mello et al., International PCT Publication No. WO 01/29058, describe the identification of specific genes involved in dsRNA-mediated RNAi. Pachuck et al., International PCT Publication No. WO 00/63364, describe certain long (at least 200 nucleotide) dsRNA constructs. Deschamps Depaillette et al., International PCT Publication No. WO 99/07409, describe specific compositions consisting of particular dsRNA molecules combined with certain anti-viral agents. Waterhouse et al., International PCT Publication No. 99/53050 and 1998, PNAS, 95, 13959-13964, describe certain methods for decreasing the phenotypic expression of a nucleic acid in plant cells using certain dsRNAs. Driscoll et al., International PCT Publication No. WO 01/49844, describe specific DNA expression constructs for use in facilitating gene silencing in targeted organisms.

[0012] Others have reported on various RNAi and gene-silencing systems. For example, Parrish et al., 2000, Molecular Cell, 6, 1077-1087, describe specific chemically-modified dsRNA constructs targeting the unc-22 gene of C. elegans. Grossniklaus, International PCT Publication No. WO 01/38551, describes certain methods for regulating polycomb gene expression in plants using certain dsRNAs. Churikov et al., International PCT Publication No. WO 01/42443, describe certain methods for modifying genetic characteristics of an organism using certain dsRNAs. Cogoni et al., International PCT Publication No. WO 01/53475, describe certain methods for isolating a Neurospora silencing gene and uses thereof. Reed et al., International PCT Publication No. WO 01/68836, describe certain methods for gene silencing in plants. Honer et al., International PCT Publication No. WO 01/70944, describe certain methods of drug screening using transgenic nematodes as Parkinson's Disease models using certain dsRNAs. Deak et al., International PCT Publication No. WO 01/72774, describe certain Drosophila-derived gene products that may be related to RNAi in Drosophila. Arndt et al., International PCT Publication No. WO 01/92513 describe certain methods for mediating gene suppression by using factors that enhance RNAi. Tuschl et al., International PCT Publication No. WO 02/44321, describe certain synthetic siRNA constructs. Pachuk et al., International PCT Publication No. WO 00/63364, and Satishchandran et al., International PCT Publication No. WO 01/04313, describe certain methods and compositions for inhibiting the function of certain polynucleotide sequences using certain long (over 250 bp), vector expressed dsRNAs. Echeverri et al., International PCT Publication No. WO 02/38805, describe certain C. elegans genes identified via RNAi. Kreutzer et al. International PCT Publications Nos. WO 02/055692, WO 02/055693, and EP 1144623 B1 describes certain methods for inhibiting gene expression using dsRNA. Graham et al., International PCT Publications Nos. WO 99/49029 and WO 01/70949, and AU 4037501 describe certain vector expressed siRNA molecules. Fire et al., U.S. Pat. No. 6,506,559, describe certain methods for inhibiting gene expression in vitro using certain long dsRNA (299 bp-1033 bp) constructs that mediate RNAi. Martinez et al., 2002, Cell, 110, 563-574, describe certain single stranded siRNA constructs, including certain 5′-phosphorylated single stranded siRNAs that mediate RNA interference in Hela cells. Harborth et al., 2003, Antisense & Nucleic Acid Drug Development, 13, 83-105, describe certain chemically and structurally modified siRNA molecules. Chiu and Rana, 2003, RNA, 9, 1034-1048, describe certain chemically and structurally modified siRNA molecules.

[0013] McCaffrey et al., 2002, Nature, 418, 38-39, describes the use of certain siRNA constructs targeting a chimeric SARS NS5B protein/luciferase transcript in mice.

[0014] Randall et al., 2003, PNAS USA, 100, 235-240, describe certain siRNA constructs targeting SARS RNA in Huh7 hepatoma cell lines.

### SUMMARY OF THE INVENTION

[0015] This invention comprises compounds, compositions, and methods useful for modulating the expression of genes associated with the development or maintenance of SARS virus infection, acute respiratory failure, viral pneumonia, and/or other disease states associated with SARS virus infection, using short interfering nucleic acid (siNA) molecules. This invention also comprises compounds, compositions, and methods useful for modulating the expression and activity of severe acute respiratory syndrome (SARS) associated cornavirus or genes involved in severe acute respiratory syndrome (SARS) associated comavirus gene expression and/or activity by RNA interference (RNAi) using small nucleic acid molecules. In particular, the instant invention features small nucleic acid molecules, such as short interfering nucleic acid (siNA), short interfering RNA (siRNA), double-stranded RNA (dsRNA), micro-RNA (miRNA), and short hairpin RNA (shRNA) molecules and methods used to modulate the expression of severe acute respiratory syndrome (SARS) associated comavirus. For convenience, all forms of the small nucleic acid molecules of the invention (e.g., siRNA, dsRNA, micro-RNA, etc.) are referred to herein as “siNA,” unless expressly stated otherwise.

[0016] A siNA of the invention can be unmodified or chemically-modified. A siNA of the instant invention can be chemically synthesized, expressed from a vector or enzymatically synthesized. The instant invention also features various chemically-modified synthetic short interfering nucleic acid (siNA) molecules capable of modulating repeat expansion gene expression or activity in cells by RNA interference (RNAi). The use of chemically-modified siNA improves various properties of native siNA molecules through increased resistance to nuclease degradation in vivo and/or through improved cellular uptake. Further, contrary to earlier published studies, siNA having multiple chemical modifications retains its RNAi activity. The siNA molecules of the instant invention are useful reagents and are useful in methods for a variety of therapeutic, diagnostic, target validation, genomic discovery, genetic engineering, and pharmacogenomic applications.

[0017] In one embodiment, the invention comprises one or more siNA molecules (and methods of using them) that independently or in combination modulate the expression of gene(s) encoding SARS virus. Specifically, the present invention comprises siNA molecules that modulate the expression of SARS proteins, for example, proteins encoded by SARS virus genome, such as Genbank Accession Nos. in Table I.

[0018] In one embodiment, the invention comprises one or more siNA molecules (and methods of using them) that independently or in combination modulate the expression of genes representing cellular targets for SARS virus infection, such as cellular receptors, cell surface molecules, cellular enzymes, cellular transcription factors, and/or cytokines, second messengers, and cellular accessory molecules.

[0019] Due to the high sequence variability of the SARS genome, selection of siNA molecules for broad therapeutic applications preferably involve the conserved regions of the SARS genome. In one embodiment, the present invention comprises siNA molecules that target the conserved regions of the SARS genome, such as the polymerase encoding region of the SARS virus genomic RNA. Therefore, siNA molecules of the invention are designed to target all the different isolates of SARS. siNA molecules designed to target conserved regions of various SARS isolates enable efficient inhibition of SARS replication in diverse patient populations and ensure the effectiveness of the siNA molecules against SARS quasi species that evolve due to mutations in the non-conserved regions of the SARS genome. Therefore, a single siNA molecule can be targeted against all isolates of SARS by designing the siNA molecule to interact with conserved nucleotide sequences of SARS (such conserved sequences are expected to be present in the RNA of all SARS isolates).

[0020] In one embodiment, a siNA molecule is designed to target the 3′-untranslated region and/or the shared leader sequence of genomic SARS RNA transcripts. Because SARS cornavirus mRNAs are nested with the genomic RNA and share common 3′ region and polyA region, a single siNA targeting the 3′-end can target all transcripts plus the genomic RNA.

[0021] In one embodiment, a siNA molecule of the invention targets both the plus (genomic) strand RNA and minus strand RNA of the SARS virus. Because the SARS virus generates a minus strand RNA from plus strand genomic RNA, a double stranded siNA molecule targeting the plus strand will also target the minus strand, thus allowing a single double-stranded siNA to target both the plus (genomic) and the minus strand of the SARS virus. For example, a double stranded siNA molecule targeting the 3′-end of the SARS virus genomic strand will also target the 3′-end of the minus strand, thus allowing a single double-stranded siNA to target both the plus and the minus strand of the SARS virus.

[0022] In one embodiment, the invention comprises one or more siNA molecules (and methods of using them) that independently or in combination modulate the expression of gene(s) encoding SARS virus and/or cellular proteins associated with the maintenance or development of SARS virus infection and/or acute respiratory failure, viral pneumonia, such as genes encoding sequences comprising those sequences referred to by GenBank Accession Nos. shown in Table I, referred to herein generally as SARS. The description below of the various aspects and embodiments of the invention is provided with reference to exemplary severe acute respiratory syndrome (SARS) associated cornavirus genes, generally referred to herein as SARS. However, such reference is meant to be exemplary only and the various aspects and embodiments of the invention are also directed to other genes that express alternate SARS genes, such as mutant SARS genes, splice variants of SARS genes, and genes encoding different strains of SARS, as well as as cellular targets for SARS, such as those described herein. The various aspects and embodiments are also directed to other genes involved in SARS pathways, including genes that encode cellular proteins involved in the maintenance and/or development of SARS virus infection and/or acute respiratory failure or other genes that express other proteins associated with SARS virus infection, such as cellular proteins that are utilized in the SARS life-cycle. Such additional genes can be analyzed for target sites using the methods described herein for SARS. Thus, the inhibition and the effects of such inhibition of the other genes can be performed as described herein. In other words, the term “SARS” as it is defined herein below and recited in the described embodiments, is meant to encompass genes associated with the development or maintenance of SARS virus infection, such as genes which encode SARS polypeptides, including polypeptides of different strains of SARS, mutant SARS genes, and splice variants of SARS genes, as well as cellular genes involved in SARS pathways of gene expression, replication, and/or SARS activity. Also, the term “SARS” as it is defined herein and recited in the described embodiments, is meant to encompass SARS viral gene products and cellular gene products involved in SARS virus infection, such as those described herein. Thus, each of the embodiments described herein with reference to the term “SARS” are applicable to all of the virus, cellular and viral protein, peptide, polypeptide, and/or polynucleotide molecules covered by the term “SARS” as that term is defined herein.

[0023] In one embodiment, the invention features a double-stranded short interfering nucleic acid (siNA) molecule that down-regulates expression of a severe acute respiratory syndrome virus (e.g., SARS) gene, wherein said siNA molecule comprises about 19 to about 23 base pairs. Preferably the number of based pairs in the siNA molecule is 18, 19, 20, 21, 22, 23, or 24.

[0024] In one embodiment, the invention features a siNA molecule that down-regulates expression of a SARS gene, for example, wherein the SARS gene comprises SARS encoding sequence. In one embodiment, the invention features a siNA molecule that down-regulates expression of a SARS gene, for example, wherein the SARS gene comprises SARS non-coding sequence or regulatory elements involved in SARS gene expression.

[0025] In one embodiment, the invention features a siNA molecule having RNAi activity against SARS RNA, wherein the siNA molecule comprises a sequence complementary to any RNA having SARS encoding sequence, such as those sequences having GenBank Accession Nos. shown in Table I. In another embodiment, the invention features a siNA molecule having RNAi activity against SARS RNA, wherein the siNA molecule comprises a sequence complementary to an RNA having other SARS encoding sequence, for example other mutant SARS genes not shown in Table I but known in the art to be associated with respiratory and/or pulmonary disease, SARS virus infection and/or acute respiratory failure, viral pneumonia, impeded respiration, respiratory distress syndrome, pulmonary hypertension, or pulmonary vasoconstriction. Chemical modifications as shown in Tables III and IV or otherwise described herein can be applied to any siNA construct of the invention. In another embodiment, a siNA molecule of the invention includes nucleotide sequence that can interact with nucleotide sequence of a SARS gene and thereby mediate silencing of SARS gene expression, for example, wherein the siNA mediates regulation of SARS gene expression by cellular processes that modulate the chromatin structure of the SARS gene and prevent transcription of the SARS gene.

[0026] In another embodiment, the invention features a siNA molecule comprising nucleotide sequence, for example, nucleotide sequence in the antisense region of the siNA molecule that is complementary to a nucleotide sequence or portion of sequence of a SARS gene. In another embodiment, the invention features a siNA molecule comprising a region, for example, the antisense region of the siNA construct, complementary to a sequence comprising a SARS gene sequence or a portion thereof.

[0027] In one embodiment, the antisense region of SARS siNA constructs can comprise a sequence complementary to sequence having any of SEQ ID NOs. 1-1651 or 3303-3318. In one embodiment, the antisense region can also comprise sequence having any of SEQ ID NOs. 1652-3302, 3319-3326, 3335-3342, 3351-3358, 3367-3374, 3376, 3378, 3380, 3383, 3385, 3387, 3389, or 3392. In another embodiment, the sense region of the SARS constructs can comprise sequence having any of SEQ ID NOs. 1-1651, 3303-3310, 3311-3318, 3327-3334, 3343-3350, 3359-3366, 3375, 3377, 3379, 3381, 3382, 3384, 3386, 3388, 3390, or 3391.

[0028] In one embodiment, a siNA molecule of the invention comprises any of SEQ ID NOs. 1-3392. The sequences shown in SEQ ID NOs: 1-3392 are not limiting. A siNA molecule of the invention can comprise any contiguous SARS sequence (e.g., about 19 to about 25, or about 19, 20, 21, 22, 23, 24 or 25 contiguous SARS nucleotides).

[0029] In yet another embodiment, the invention features a siNA molecule comprising a sequence, for example, the antisense sequence of the siNA construct, complementary to a sequence or portion of sequence comprising sequence represented by GenBank Accession Nos. shown in Table I. Chemical modifications in Tables III and IV and described herein can be applied to any siNA construct of the invention. siNA molecules of the invention are unmodified or have up to all nucleotides modified with modifications according to Tables III and IV.

[0030] In one embodiment of the invention a siNA molecule comprises an antisense strand having about 19 to about 29 (e.g., 18, 19, 20, 21, 22, 23, 24, 25, 26, 27, 28, 29, or 30) nucleotides, wherein the antisense strand is complementary to a RNA sequence encoding a SARS protein, and wherein said siNA further comprises a sense strand having about 19 to about 29 (e.g., 18, 19, 20, 21, 22, 23, 24, 25, 26, 27, 28, 29, or 30) nucleotides, and wherein said sense strand and said antisense strand are distinct nucleotide sequences with at least about 19 complementary nucleotides.

[0031] In another embodiment of the invention a siNA molecule of the invention comprises an antisense region having about 19 to about 29 (e.g., 18, 19, 20, 21, 22, 23, 24, 25, 26, 27, 28, 29, or 30) nucleotides, wherein the antisense region is complementary to a RNA sequence encoding a SARS protein, and wherein said siNA further comprises a sense region having about 19 to about 29 (e.g., 18, 19, 20, 21, 22, 23, 24, 25, 26, 27, 28, 29 or more) nucleotides, wherein said sense region and said antisense region comprise a linear molecule with at least about 19 complementary nucleotides.

[0032] In one embodiment of the invention a siNA molecule comprises an antisense strand comprising a nucleotide sequence that is complementary to a nucleotide sequence or a portion thereof encoding a SARS protein. The siNA further comprises a sense strand, wherein said sense strand comprises a nucleotide sequence of a SARS gene or a portion thereof.

[0033] In another embodiment, a siNA molecule comprises an antisense region comprising a nucleotide sequence that is complementary to a nucleotide sequence encoding a SARS protein or a portion thereof. The siNA molecule further comprises a sense region, wherein said sense region comprises a nucleotide sequence of a SARS gene or a portion thereof.

[0034] In one embodiment, a siNA molecule of the invention has RNAi activity that modulates expression of RNA encoded by a SARS gene. Because SARS genes can share some degree of sequence homology with each other, siNA molecules can be designed to target a class of SARS genes or alternately specific SARS genes by selecting sequences that are either shared among different SARS targets (e.g., different viral strains) or alternatively that are unique for a specific SARS target (e.g., a particular viral strain). Therefore, in one embodiment, the siNA molecule can be designed to target conserved regions of SARS RNA sequences having homology among several SARS genes so as to target several SARS genes (e.g., different SARS isoforms, splice variants, mutant genes etc.) with one siNA molecule. In another embodiment, the siNA molecule can be designed to target a sequence that is unique to a specific SARS RNA sequence due to the high degree of specificity that the siNA molecule requires to mediate RNAi activity.

[0035] In one embodiment, nucleic acid molecules of the invention that act as mediators of the RNA interference gene silencing response are double-stranded nucleic acid molecules. In another embodiment, the siNA molecules of the invention consist of duplexes containing about 19 base pairs between oligonucleotides comprising about 19 to about 25 (e.g., 18, 19, 20, 21, 22, 23, 24, 25, or 26) nucleotides. In yet another embodiment, siNA molecules of the invention comprise duplexes with overhanging ends of about 1 to about 3 (e.g., 1, 2, 3, or 4) nucleotides, for example, about 21-nucleotide duplexes with about 19 base pairs and 3′-terminal mononucleotide, dinucleotide, or trinucleotide overhangs.

[0036] In one embodiment, the invention features one or more chemically-modified siNA constructs having specificity for SARS expressing nucleic acid molecules, such as RNA encoding a SARS protein. Non-limiting examples of such chemical modifications include without limitation phosphorothioate internucleotide linkages, 2′-deoxyribonucleotides, 2′-O-methyl ribonucleotides, 2′-deoxy-2′-fluoro ribonucleotides, “universal base” nucleotides, “acyclic” nucleotides, 5-C-methyl nucleotides, and terminal glyceryl and/or inverted deoxy abasic residue incorporation. These chemical modifications, when used in various siNA constructs, are shown to preserve RNAi activity in cells while at the same time, dramatically increasing the serum stability of these compounds. Furthermore, contrary to the data published by Parrish et al., supra, applicant demonstrates that multiple (greater than one) phosphorothioate substitutions are well-tolerated and confer substantial increases in serum stability for modified siNA constructs.

[0037] In one embodiment, a siNA molecule of the invention comprises modified nucleotides while maintaining the ability to mediate RNAi. The modified nucleotides can be used to improve in vitro or in vivo characteristics such as stability, activity, and/or bioavailability. For example, a siNA molecule of the invention can comprise modified nucleotides as a percentage of the total number of nucleotides present in the siNA molecule. As such, a siNA molecule of the invention can generally comprise about 5% to about 100% modified nucleotides (e.g., 5%, 10%, 15%, 20%, 25%, 30%, 35%, 40%, 45%, 50%, 55%, 60%, 65%, 70%, 75%, 80%, 85%, 90%, 95% or 100% modified nucleotides). The actual percentage of modified nucleotides present in a given siNA molecule will depend on the total number of nucleotides present in the siNA. If the siNA molecule is single stranded, the percent modification can be based upon the total number of nucleotides present in the single stranded siNA molecules. Likewise, if the siNA molecule is double stranded, the percent modification can be based upon the total number of nucleotides present in the sense strand, antisense strand, or both the sense and antisense strands.

[0038] One aspect of the invention features a double-stranded short interfering nucleic acid (siNA) molecule that down-regulates expression of a SARS gene. In one embodiment, a double stranded siNA molecule comprises one or more chemical modifications and each strand of the double-stranded siNA is about 21 nucleotides long. In one embodiment, the double-stranded siNA molecule does not contain any ribonucleotides. In another embodiment, the double-stranded siNA molecule comprises one or more ribonucleotides. In one embodiment, each strand of the double-stranded siNA molecule comprises about 19 to about 23 (e.g., about 19, 20, 21, 22, 23, 24, 25, 26, 27, 28, or 29) nucleotides, wherein each strand comprises about 19 nucleotides that are complementary to the nucleotides of the other strand. In one embodiment, one of the strands of the double-stranded siNA molecule comprises a nucleotide sequence that is complementary to a nucleotide sequence or a portion thereof of the SARS gene, and the second strand of the double-stranded siNA molecule comprises a nucleotide sequence substantially similar to the nucleotide sequence of the SARS gene or a portion thereof.

[0039] In another embodiment, the invention features a double-stranded short interfering nucleic acid (siNA) molecule that down-regulates expression of a SARS gene comprising an antisense region, wherein the antisense region comprises a nucleotide sequence that is complementary to a nucleotide sequence of the SARS gene or a portion thereof, and a sense region, wherein the sense region comprises a nucleotide sequence substantially similar to the nucleotide sequence of the SARS gene or a portion thereof. In one embodiment, the antisense region and the sense region each comprise about 19 to about 23 (e.g. about 19, 20, 21, 22, or 23) nucleotides, wherein the antisense region comprises about 19 nucleotides that are complementary to nucleotides of the sense region.

[0040] In another embodiment, the invention features a double-stranded short interfering nucleic acid (siNA) molecule that down-regulates expression of a SARS gene comprising a sense region and an antisense region, wherein the antisense region comprises a nucleotide sequence that is complementary to a nucleotide sequence of RNA encoded by the SARS gene or a portion thereof and the sense region comprises a nucleotide sequence that is complementary to the antisense region.

[0041] In one embodiment, the SARS virus RNA comtemplated by the invention comprises SARS virus minus strand RNA. In another embodiment, the SARS virus RNA comtemplated by the invention comprises SARS virus plus strand RNA.

[0042] In one embodiment, a siNA molecule of the invention comprises blunt ends, i.e., ends that do not include any overhanging nucleotides. For example, a siNA molecule of the invention comprising modifications described herein (e.g., comprising nucleotides having Formulae I-VII or siNA constructs comprising Stab00-Stab22 or any combination thereof (see Table IV)) and/or any length described herein can comprise blunt ends or ends with no overhanging nucleotides.

[0043] In one embodiment, any siNA molecule of the invention can comprise one or more blunt ends, i.e., where a blunt end does not have any overhanging nucleotides. In a non-limiting example, a blunt ended siNA molecule has a number of base pairs equal to the number of nucleotides present in each strand of the siNA molecule. In another example, a siNA molecule comprises one blunt end, for example wherein the 5′-end of the antisense strand and the 3′-end of the sense strand do not have any overhanging nucleotides. In another example, a siNA molecule comprises one blunt end, for example wherein the 3′-end of the antisense strand and the 5′-end of the sense strand do not have any overhanging nucleotides. In another example, a siNA molecule comprises two blunt ends, for example wherein the 3′-end of the antisense strand and the 5′-end of the sense strand as well as the 5′-end of the antisense strand and 3′-end of the sense strand do not have any overhanging nucleotides. A blunt ended siNA molecule can comprise, for example, from about 18 to about 30 nucleotides (e.g., about 18, 19, 20, 21, 22, 23, 24, 25, 26, 27, 28, 29, or 30 nucleotides). Other nucleotides present in a blunt ended siNA molecule can comprise mismatches, bulges, loops, or wobble base pairs, for example, to modulate the activity of the siNA molecule to mediate RNA interference.

[0044] By “blunt ends” is meant symmetric termini or termini of a double stranded siNA molecule having no overhanging nucleotides. The two strands of a double stranded siNA molecule align with each other without over-hanging nucleotides at the termini. For example, a blunt ended siNA construct comprises terminal nucleotides that are complementary between the sense and antisense regions of the siNA molecule.

[0045] In one embodiment, the invention features a double-stranded short interfering nucleic acid (siNA) molecule that down-regulates expression of a SARS gene, wherein the siNA molecule is assembled from two separate oligonucleotide fragments wherein one fragment comprises the sense region and the second fragment comprises the antisense region of the siNA molecule. The sense region can be connected to the antisense region via a linker molecule, such as a polynucleotide linker or a non-nucleotide linker.

[0046] In one embodiment, the invention features double-stranded short interfering nucleic acid (siNA) molecule that down-regulates expression of a SARS gene, wherein the siNA molecule comprises about 19 to about 21 base pairs, and wherein each strand of the siNA molecule comprises one or more chemical modifications. In another embodiment, one of the strands of the double-stranded siNA molecule comprises a nucleotide sequence that is complementary to a nucleotide sequence of a SARS gene or a portion thereof, and the second strand of the double-stranded siNA molecule comprises a nucleotide sequence substantially similar to the nucleotide sequence or a portion thereof of the SARS gene. In another embodiment, one of the strands of the double-stranded siNA molecule comprises a nucleotide sequence that is complementary to a nucleotide sequence of a SARS gene or a portion thereof, and the second strand of the double-stranded siNA molecule comprises a nucleotide sequence substantially similar to the nucleotide sequence or a portion thereof of the SARS gene. In another embodiment, each strand of the siNA molecule comprises about 19 to about 23 nucleotides, and each strand comprises at least about 19 nucleotides that are complementary to the nucleotides of the other strand. The SARS gene can comprise, for example, sequences referred to Table I.

[0047] In one embodiment, a siNA molecule of the invention comprises no ribonucleotides. In another embodiment, a siNA molecule of the invention comprises ribonucleotides.

[0048] In one embodiment, a siNA molecule of the invention comprises an antisense region comprising a nucleotide sequence that is complementary to a nucleotide sequence of a SARS gene or a portion thereof, and the siNA further comprises a sense region comprising a nucleotide sequence substantially similar to the nucleotide sequence of the SARS gene or a portion thereof. In another embodiment, the antisense region and the sense region each comprise about 19 to about 23 nucleotides and the antisense region comprises at least about 19 nucleotides that are complementary to nucleotides of the sense region. The SARS gene can comprise, for example, sequences referred to Table 1.

[0049] In one embodiment, a siNA molecule of the invention comprises a sense region and an antisense region, wherein the antisense region comprises a nucleotide sequence that is complementary to a nucleotide sequence of RNA encoded by a SARS gene, or a portion thereof, and the sense region comprises a nucleotide sequence that is complementary to the antisense region. In another embodiment, the siNA molecule is assembled from two separate oligonucleotide fragments, wherein one fragment comprises the sense region and the second fragment comprises the antisense region of the siNA molecule. In another embodiment, the sense region is connected to the antisense region via a linker molecule. In another embodiment, the sense region is connected to the antisense region via a linker molecule, such as a nucleotide or non-nucleotide linker. The SARS gene can comprise, for example, sequences referred to Table I.

[0050] In one embodiment, the invention features a double-stranded short interfering nucleic acid (siNA) molecule that down-regulates expression of a SARS gene comprising a sense region and an antisense region, wherein the antisense region comprises a nucleotide sequence that is complementary to a nucleotide sequence of RNA encoded by the SARS gene or a portion thereof and the sense region comprises a nucleotide sequence that is complementary to the antisense region, and wherein the siNA molecule has one or more modified pyrimidine and/or purine nucleotides. In one embodiment, the pyrimidine nucleotides in the sense region are 2′-O-methylpyrimidine nucleotides or 2′-deoxy-2′-fluoro pyrimidine nucleotides and the purine nucleotides present in the sense region are 2′-deoxy purine nucleotides. In another embodiment, the pyrimidine nucleotides in the sense region are 2′-deoxy-2′-fluoro pyrimidine nucleotides and the purine nucleotides present in the sense region are 2′-O-methyl purine nucleotides. In another embodiment, the pyrimidine nucleotides in the sense region are 2′-deoxy-2′-fluoro pyrimidine nucleotides and the purine nucleotides present in the sense region are 2′-deoxy purine nucleotides. In one embodiment, the pyrimidine nucleotides in the antisense region are 2′-deoxy-2′-fluoro pyrimidine nucleotides and the purine nucleotides present in the antisense region are 2′-O-methyl or 2′-deoxy purine nucleotides. In another embodiment of any of the above-described siNA molecules, any nucleotides present in a non-complementary region of the sense strand (e.g. overhang region) are 2′-deoxy nucleotides.

[0051] In one embodiment, the invention features a double-stranded short interfering nucleic acid (siNA) molecule that down-regulates expression of a SARS gene, wherein the siNA molecule is assembled from two separate oligonucleotide fragments wherein one fragment comprises the sense region and the second fragment comprises the antisense region of the siNA molecule, and wherein the fragment comprising the sense region includes a terminal cap moiety at the 5′-end, the 3′-end, or both of the 5′ and 3′ ends of the fragment. In another embodiment, the terminal cap moiety is an inverted deoxy abasic moiety or glyceryl moiety, In another embodiment, each of the two fragments of the siNA molecule comprise about 21 nucleotides.

[0052] In one embodiment, the invention features a siNA molecule comprising at least one modified nucleotide, wherein the modified nucleotide is a 2′-deoxy-2′-fluoro nucleotide. The siNA can be, for example, of length between about 12 and about 36 nucleotides. In another embodiment, all pyrimidine nucleotides present in the siNA are 2′-deoxy-2′-fluoro pyrimidine nucleotides. In another embodiment, the modified nucleotides in the siNA include at least one 2′-deoxy-2′-fluoro cytidine or 2′-deoxy-2′-fluoro uridine nucleotide. In another embodiment, the modified nucleotides in the siNA include at least one 2′-fluoro cytidine and at least one 2′-deoxy-2′-fluoro uridine nucleotides. In another embodiment, all uridine nucleotides present in the siNA are 2′-deoxy-2′-fluoro uridine nucleotides. In another embodiment, all cytidine nucleotides present in the siNA are 2′-deoxy-2′-fluoro cytidine nucleotides. In another embodiment, all adenosine nucleotides present in the siNA are 2′-deoxy-2′-fluoro adenosine nucleotides. In another embodiment, all guanosine nucleotides present in the siNA are 2′-deoxy-2′-fluoro guanosine nucleotides. The siNA can further comprise at least one modified internucleotidic linkage, such as phosphorothioate linkage. In another embodiment, the 2′-deoxy-2′-fluoronucleotides are present at specifically selected locations in the siNA that are sensitive to cleavage by ribonucleases, such as locations having pyrimidine nucleotides.

[0053] In one embodiment, the invention features a method of increasing the stability of a siNA molecule against cleavage by ribonucleases comprising introducing at least one modified nucleotide into the siNA molecule, wherein the modified nucleotide is a 2′-deoxy-2′-fluoro nucleotide. In another embodiment, all pyrimidine nucleotides present in the siNA are 2′-deoxy-2′-fluoro pyrimidine nucleotides. In another embodiment, the modified nucleotides in the siNA include at least one 2′-deoxy-2′-fluoro cytidine or 2′-deoxy-2′-fluoro uridine nucleotide. In another embodiment, the modified nucleotides in the siNA include at least one 2′-fluoro cytidine and at least one 2′-deoxy-2′-fluoro uridine nucleotides. In another embodiment, all uridine nucleotides present in the siNA are 2′-deoxy-2′-fluoro uridine nucleotides. In another embodiment, all cytidine nucleotides present in the siNA are 2′-deoxy-2′-fluoro cytidine nucleotides. In another embodiment, all adenosine nucleotides present in the siNA are 2′-deoxy-2′-fluoro adenosine nucleotides. In another embodiment, all guanosine nucleotides present in the siNA are 2′-deoxy-2′-fluoro guanosine nucleotides. The siNA can further comprise at least one modified internucleotidic linkage, such as phosphorothioate linkage. In another embodiment, the 2′-deoxy-2′-fluoronucleotides are present at specifically selected locations in the siNA that are sensitive to cleavage by ribonucleases, such as locations having pyrimidine nucleotides.

[0054] In one embodiment, the invention features a double-stranded short interfering nucleic acid (siNA) molecule that down-regulates expression of a SARS gene comprising a sense region and an antisense region, wherein the antisense region comprises a nucleotide sequence that is complementary to a nucleotide sequence of RNA encoded by the SARS gene or a portion thereof and the sense region comprises a nucleotide sequence that is complementary to the antisense region, and wherein the purine nucleotides present in the antisense region comprise 2′-deoxy-purine nucleotides. In an alternative embodiment, the purine nucleotides present in the antisense region comprise 2′-O-methyl purine nucleotides. In either of the above embodiments, the antisense region can comprise a phosphorothioate internucleotide linkage at the 3′ end of the antisense region. Alternatively, in either of the above embodiments, the antisense region can comprise a glyceryl modification at the 3′ end of the antisense region. In another embodiment of any of the above-described siNA molecules, any nucleotides present in a non-complementary region of the antisense strand (e.g. overhang region) are 2′-deoxy nucleotides.

[0055] In one embodiment, the antisense region of a siNA molecule of the invention comprises sequence complementary to a portion of a SARS transcript having sequence unique to a particular SARS disease related allele, such as sequence comprising a SNP associated with the disease specific allele. As such, the antisense region of a siNA molecule of the invention can comprise sequence complementary to sequences that are unique to a particular allele to provide specificity in mediating selective RNAi against the disease related allele.

[0056] In one embodiment, the invention features a double-stranded short interfering nucleic acid (siNA) molecule that down-regulates expression of a SARS gene, wherein the siNA molecule is assembled from two separate oligonucleotide fragments wherein one fragment comprises the sense region and the second fragment comprises the antisense region of the siNA molecule. In another embodiment about 19 nucleotides of each fragment of the siNA molecule are base-paired to the complementary nucleotides of the other fragment of the siNA molecule and wherein at least two 3′ terminal nucleotides of each fragment of the siNA molecule are not base-paired to the nucleotides of the other fragment of the siNA molecule. In one embodiment, each of the two 3′ terminal nucleotides of each fragment of the siNA molecule is a 2′-deoxy-pyrimidine nucleotide, such as a 2′-deoxy-thymidine. In another embodiment, all 21 nucleotides of each fragment of the siNA molecule are base-paired to the complementary nucleotides of the other fragment of the siNA molecule. In another embodiment, about 19 nucleotides of the antisense region are base-paired to the nucleotide sequence or a portion thereof of the RNA encoded by the SARS gene. In another embodiment, about 21 nucleotides of the antisense region are base-paired to the nucleotide sequence or a portion thereof of the RNA encoded by the SARS gene. In any of the above embodiments, the 5′-end of the fragment comprising said antisense region can optionally includes a phosphate group.

[0057] In one embodiment, the invention features a double-stranded short interfering nucleic acid (siNA) molecule that inhibits the expression of a SARS RNA sequence (e.g., wherein said target RNA sequence is encoded by a SARS gene involved in the SARS pathway), wherein the siNA molecule does not contain any ribonucleotides and wherein each strand of the double-stranded siNA molecule is about 21 nucleotides long. Examples of non-ribonucleotide containing siNA constructs are combinations of stabilization chemistries shown in Table IV in any combination of Sense/Antisense chemistries, such as Stab 7/8, Stab 7/11, Stab 8/8, Stab 18/8, Stab 18/11, Stab 12/13, Stab 7/13, Stab 18/13, Stab 7/19, Stab 8/19, Stab 18/19, Stab 7/20, Stab 8/20, or Stab 18/20.

[0058] In one embodiment, the invention features a chemically synthesized double stranded RNA molecule that directs cleavage of a SARS RNA via RNA interference, wherein each strand of said RNA molecule is about 21 to about 23 nucleotides in length; one strand of the RNA molecule comprises nucleotide sequence having sufficient complementarity to the SARS RNA for the RNA molecule to direct cleavage of the SARS RNA via RNA interference; and wherein at least one strand of the RNA molecule comprises one or more chemically modified nucleotides described herein, such as deoxynucleotides, 2′-O-methyl nucleotides, 2′-deoxy-2′-fluoro nucloetides, 2′-O-methoxyethyl nucleotides etc.

[0059] In one embodiment, the invention features a medicament comprising a siNA molecule of the invention.

[0060] In one embodiment, the invention features an active ingredient comprising a siNA molecule of the invention.

[0061] In one embodiment, the invention features the use of a double-stranded short interfering nucleic acid (siNA) molecule to down-regulate expression of a SARS gene, wherein the siNA molecule comprises one or more chemical modifications and each strand of the double-stranded siNA is about 18 to about 28 or more (e.g., 18, 19, 20, 21, 22, 23, 24, 25, 26, 27, 28 or more) nucleotides long.

[0062] In one embodiment, the invention features the use of a double-stranded short interfering nucleic acid (siNA) molecule that inhibits expression of a SARS gene, wherein one of the strands of the double-stranded siNA molecule is an antisense strand which comprises nucleotide sequence that is complementary to nucleotide sequence of SARS RNA or a portion thereof, the other strand is a sense strand which comprises nucleotide sequence that is complementary to a nucleotide sequence of the antisense strand and wherein a majority of the pyrimidine nucleotides present in the double-stranded siNA molecule comprises a sugar modification.

[0063] In one embodiment, the invention features a double-stranded short interfering nucleic acid (siNA) molecule that inhibits expression of a SARS gene, wherein one of the strands of the double-stranded siNA molecule is an antisense strand which comprises nucleotide sequence that is complementary to nucleotide sequence of SARS RNA or a portion thereof, wherein the other strand is a sense strand which comprises nucleotide sequence that is complementary to a nucleotide sequence of the antisense strand and wherein a majority of the pyrimidine nucleotides present in the double-stranded siNA molecule comprises a sugar modification.

[0064] In one embodiment, the invention features a double-stranded short interfering nucleic acid (siNA) molecule that inhibits expression of a SARS gene, wherein one of the strands of the double-stranded siNA molecule is an antisense strand which comprises nucleotide sequence that is complementary to nucleotide sequence of SARS RNA that encodes a protein or portion thereof, the other strand is a sense strand which comprises nucleotide sequence that is complementary to a nucleotide sequence of the antisense strand and wherein a majority of the pyrimidine nucleotides present in the double-stranded siNA molecule comprises a sugar modification. In one embodiment, the invention features a double-stranded short interfering nucleic acid (siNA) molecule that inhibits expression of a SARS gene, wherein one of the strands of the double-stranded siNA molecule is an antisense strand which comprises nucleotide sequence that is complementary to nucleotide sequence of SARS RNA or a portion thereof, the other strand is a sense strand which comprises nucleotide sequence that is complementary to a nucleotide sequence of the antisense strand and wherein a majority of the pyrimidine nucleotides present in the double-stranded siNA molecule comprises a sugar modification. In one embodiment, each strand of the siNA molecule comprises about 18 to about 29 or more (e.g., about 18, 19, 20, 21, 22, 23, 24, 25, 26, 27, 28, 29 or more) nucleotides, wherein each strand comprises at least about 18 nucleotides that are complementary to the nucleotides of the other strand. In another embodiment, the siNA molecule is assembled from two oligonucleotide fragments, wherein one fragment comprises the nucleotide sequence of the antisense strand of the siNA molecule and a second fragment comprises nucleotide sequence of the sense region of the siNA molecule. In yet another embodiment, the sense strand is connected to the antisense strand via a linker molecule, such as a polynucleotide linker or a non-nucleotide linker.

[0065] In a further embodiment, the pyrimidine nucleotides present in the sense strand are 2′-deoxy-2′fluoro pyrimidine nucleotides and the purine nucleotides present in the sense region are 2′-deoxy purine nucleotides. In another embodiment, the pyrimidine nucleotides present in the sense strand are 2′-deoxy-2′fluoro pyrimidine nucleotides and the purine nucleotides present in the sense region are 2′-O-methyl purine nucleotides. In still another embodiment, the pyrimidine nucleotides present in the antisense strand are 2′-deoxy-2′-fluoro pyrimidine nucleotides and any purine nucleotides present in the antisense strand are 2′-deoxy purine nucleotides. In another embodiment, the antisense strand comprises one or more 2′-deoxy-2′-fluoro pyrimidine nucleotides and one or more 2′-O-methyl purine nucleotides. In another embodiment, the pyrimidine nucleotides present in the antisense strand are 2′-deoxy-2′-fluoro pyrimidine nucleotides and any purine nucleotides present in the antisense strand are 2′-O-methyl purine nucleotides. In a further embodiment the sense strand comprises a 3′-end and a 5′-end, wherein a terminal cap moiety (e.g., an inverted deoxy abasic moiety or inverted deoxy nucleotide moiety such as inverted thymidine) is present at the 5′-end, the 3′-end, or both of the 5′ and 3′ ends of the sense strand. In another embodiment, the antisense strand comprises a phosphorothioate internucleotide linkage at the 3′ end of the antisense strand. In another embodiment, the antisense strand comprises a glyceryl modification at the 3′ end. In another embodiment, the 5′-end of the antisense strand optionally includes a phosphate group.

[0066] In one embodiment, the invention features a double-stranded short interfering nucleic acid (siNA) molecule that inhibits expression of a SARS gene, wherein one of the strands of the double-stranded siNA molecule is an antisense strand which comprises nucleotide sequence that is complementary to nucleotide sequence of SARS RNA or a portion thereof, wherein the other strand is a sense strand which comprises nucleotide sequence that is complementary to a nucleotide sequence of the antisense strand and wherein a majority of the pyrimidine nucleotides present in the double-stranded siNA molecule comprises a sugar modification, and wherein each of the two strands of the siNA molecule comprises about 21 nucleotides. In one embodiment, about 21 nucleotides of each strand of the siNA molecule are base-paired to the complementary nucleotides of the other strand of the siNA molecule. In another embodiment, about 19 nucleotides of each strand of the siNA molecule are base-paired to the complementary nucleotides of the other strand of the siNA molecule, wherein at least two 3′ terminal nucleotides of each strand of the siNA molecule are not base-paired to the nucleotides of the other strand of the siNA molecule. In another embodiment, each of the two 3′ terminal nucleotides of each fragment of the siNA molecule is a 2′-deoxy-pyrimidine, such as 2′-deoxy-thymidine. In another embodiment, each strand of the siNA molecule is base-paired to the complementary nucleotides of the other strand of the siNA molecule. In another embodiment, about 19 nucleotides of the antisense strand are base-paired to the nucleotide sequence of the SARS RNA or a portion thereof. In another embodiment, about 21 nucleotides of the antisense strand are base-paired to the nucleotide sequence of the SARS RNA or a portion thereof.

[0067] In one embodiment, the invention features a double-stranded short interfering nucleic acid (siNA) molecule that inhibits expression of a SARS gene, wherein one of the strands of the double-stranded siNA molecule is an antisense strand which comprises nucleotide sequence that is complementary to nucleotide sequence of SARS RNA or a portion thereof, the other strand is a sense strand which comprises nucleotide sequence that is complementary to a nucleotide sequence of the antisense strand and wherein a majority of the pyrimidine nucleotides present in the double-stranded siNA molecule comprises a sugar modification, and wherein the 5′-end of the antisense strand optionally includes a phosphate group.

[0068] In one embodiment, the invention features a double-stranded short interfering nucleic acid (siNA) molecule that inhibits expression of a SARS gene, wherein one of the strands of the double-stranded siNA molecule is an antisense strand which comprises nucleotide sequence that is complementary to nucleotide sequence of SARS RNA or a portion thereof, the other strand is a sense strand which comprises nucleotide sequence that is complementary to a nucleotide sequence of the antisense strand and wherein a majority of the pyrimidine nucleotides present in the double-stranded siNA molecule comprises a sugar modification, and wherein the nucleotide sequence or a portion thereof of the antisense strand is complementary to a nucleotide sequence of the untranslated region or a portion thereof of the SARS RNA.

[0069] In one embodiment, the invention features a double-stranded short interfering nucleic acid (siNA) molecule that inhibits expression of a SARS gene, wherein one of the strands of the double-stranded siNA molecule is an antisense strand which comprises nucleotide sequence that is complementary to nucleotide sequence of SARS RNA or a portion thereof, wherein the other strand is a sense strand which comprises nucleotide sequence that is complementary to a nucleotide sequence of the antisense strand, wherein a majority of the pyrimidine nucleotides present in the double-stranded siNA molecule comprises a sugar modification, and wherein the nucleotide sequence of the antisense strand is complementary to a nucleotide sequence of the SARS RNA or a portion thereof that is present in the SARS RNA.

[0070] In one embodiment, the invention features a composition comprising a siNA molecule of the invention in a pharmaceutically acceptable carrier or diluent.

[0071] In a non-limiting example, the introduction of chemically-modified nucleotides into nucleic acid molecules provides a powerful tool in overcoming potential limitations of in vivo stability and bioavailability inherent to native RNA molecules that are delivered exogenously. For example, the use of chemically-modified nucleic acid molecules can enable a lower dose of a particular nucleic acid molecule for a given therapeutic effect since chemically-modified nucleic acid molecules tend to have a longer half-life in serum. Furthermore, certain chemical modifications can improve the bioavailability of nucleic acid molecules by targeting particular cells or tissues and/or improving cellular uptake of the nucleic acid molecule. Therefore, even if the activity of a chemically-modified nucleic acid molecule is reduced as compared to a native nucleic acid molecule, for example, when compared to an all-RNA nucleic acid molecule, the overall activity of the modified nucleic acid molecule can be greater than that of the native molecule due to improved stability and/or delivery of the molecule. Unlike native unmodified siNA, chemically-modified siNA can also minimize the possibility of activating interferon activity in humans.

[0072] In any of the embodiments of siNA molecules described herein, the antisense region of a siNA molecule of the invention can comprise a phosphorothioate internucleotide linkage at the 3′-end of said antisense region. In any of the embodiments of siNA molecules described herein, the antisense region can comprise about one to about five phosphorothioate internucleotide linkages at the 5′-end of said antisense region. In any of the embodiments of siNA molecules described herein, the 3′-terminal nucleotide overhangs of a siNA molecule of the invention can comprise ribonucleotides or deoxyribonucleotides that are chemically-modified at a nucleic acid sugar, base, or backbone. In any of the embodiments of siNA molecules described herein, the 3′-terminal nucleotide overhangs can comprise one or more universal base ribonucleotides. In any of the embodiments of siNA molecules described herein, the 3′-terminal nucleotide overhangs can comprise one or more acyclic nucleotides.

[0073] One embodiment of the invention provides an expression vector comprising a nucleic acid sequence encoding at least one siNA molecule of the invention in a manner that allows expression of the nucleic acid molecule. Another embodiment of the invention provides a mammalian cell comprising such an expression vector. The mammalian cell can be a human cell. The siNA molecule of the expression vector can comprise a sense region and an antisense region. The antisense region can comprise sequence complementary to a RNA or DNA sequence encoding SARS and the sense region can comprise sequence complementary to the antisense region. The siNA molecule can comprise two distinct strands having complementary sense and antisense regions. The siNA molecule can comprise a single strand having complementary sense and antisense regions.

[0074] In one embodiment, the nucleotide sequence of the antisense strand or a portion thereof of a siNA molecule of the invention is complementary to the nucleotide sequence of a SARS RNA or a portion thereof that is present in the RNA of all SARS isolates.

[0075] In one embodiment, the invention features a chemically-modified short interfering nucleic acid (siNA) molecule capable of mediating RNA interference (RNAi) against SARS inside a cell or reconstituted in vitro system, wherein the chemical modification comprises one or more (e.g., about 1, 2, 3, 4, 5, 6, 7, 8, 9, 10, or more) nucleotides comprising a backbone modified internucleotide linkage having Formula I:

[chemical structure]

[0076] wherein each R1 and R2 is independently any nucleotide, non-nucleotide, or polynucleotide which can be naturally-occurring or chemically-modified, each X and Y is independently O, S, N, alkyl, or substituted alkyl, each Z and W is independently O, S, N, alkyl, substituted alkyl, O-alkyl, S-alkyl, alkaryl, aralkyl, or acetyl and wherein W, X, Y, and Z are optionally not all O. In another embodiment, a backbone modification of the invention comprises a phosphonoacetate and/or thiophosphonoacetate internucleotide linkage (see for example Sheehan et al., 2003, Nucleic Acids Research, 31, 4109-4118).

[0077] The chemically-modified internucleotide linkages having Formula I, for example, wherein any Z, W, X, and/or Y independently comprises a sulphur atom, can be present in one or both oligonucleotide strands of the siNA duplex, for example, in the sense strand, the antisense strand, or both strands. The siNA molecules of the invention can comprise one or more (e.g., about 1, 2, 3, 4, 5, 6, 7, 8, 9, 10, or more) chemically-modified internucleotide linkages having Formula I at the 3′-end, the 5′-end, or both of the 3′ and 5′-ends of the sense strand, the antisense strand, or both strands. For example, an exemplary siNA molecule of the invention can comprise about 1 to about 5 or more (e.g., about 1, 2, 3, 4, 5, or more) chemically-modified internucleotide linkages having Formula I at the 5′-end of the sense strand, the antisense strand, or both strands. In another non-limiting example, an exemplary siNA molecule of the invention can comprise one or more (e.g., about 1, 2, 3, 4, 5, 6, 7, 8, 9, 10, or more) pyrimidine nucleotides with chemically-modified internucleotide linkages having Formula I in the sense strand, the antisense strand, or both strands. In yet another non-limiting example, an exemplary siNA molecule of the invention can comprise one or more (e.g., about 1, 2, 3, 4, 5, 6, 7, 8, 9, 10, or more) purine nucleotides with chemically-modified internucleotide linkages having Formula I in the sense strand, the antisense strand, or both strands. In another embodiment, a siNA molecule of the invention having internucleotide linkage(s) of Formula I also comprises a chemically-modified nucleotide or non-nucleotide having any of Formulae I-VII.

[0078] In one embodiment, the invention features a chemically-modified short interfering nucleic acid (siNA) molecule capable of mediating RNA interference (RNAi) against SARS inside a cell or reconstituted in vitro system, wherein the chemical modification comprises one or more (e.g., about 1, 2, 3, 4, 5, 6, 7, 8, 9, 10, or more) nucleotides or non-nucleotides having Formula II: [chemical structure]
wherein each R3, R4, R5, R6, R7, R8, R10, R11 and R12 is independently H, OH, alkyl, substituted alkyl, alkaryl or aralkyl, F, Cl, Br, CN, CF₃, OCF₃, OCN, O-alkyl, S-alkyl, N-alkyl, O-alkenyl, S-alkenyl, N-alkenyl, SO-alkyl, alkyl-OSH, alkyl-OH, O-alkyl-OH, O-alkyl-SH, S-alkyl-OH, S-alkyl-SH, alkyl-5-alkyl, alkyl-O-alkyl, ONO₂, NO₂, N3, NH₂, aminoalkyl, aminoacid, aminoacyl, ONH₂, O-aminoalkyl, O-aminoacid, O-aminoacyl, heterocycloalkyl, heterocycloalkaryl, aminoalkylamino, polyalklylamino, substituted silyl, or group having Formula I or II; R9 is O, S, CH₂, S═O, CHF, or CF₂, and B is a nucleosidic base such as adenine, guanine, uracil, cytosine, thymine, 2-aminoadenosine, 5-methylcytosine, 2,6-diaminopurine, or any other non-naturally occurring base that can be complementary or non-complementary to target RNA or a non-nucleosidic base such as phenyl, naphthyl, 3-nitropyrrole, 5-nitroindole, nebularine, pyridone, pyridinone, or any other non-naturally occurring universal base that can be complementary or non-complementary to target RNA.

[0079] The chemically-modified nucleotide or non-nucleotide of Formula II can be present in one or both oligonucleotide strands of the siNA duplex, for example in the sense strand, the antisense strand, or both strands. The siNA molecules of the invention can comprise one or more chemically-modified nucleotide or non-nucleotide of Formula II at the 3′-end, the 5′-end, or both of the 3′ and 5′-ends of the sense strand, the antisense strand, or both strands. For example, an exemplary siNA molecule of the invention can comprise about 1 to about 5 or more (e.g., about 1, 2, 3, 4, 5, or more) chemically-modified nucleotides or non-nucleotides of Formula II at the 5′-end of the sense strand, the antisense strand, or both strands. In anther non-limiting example, an exemplary siNA molecule of the invention can comprise about 1 to about 5 or more (e.g., about 1, 2, 3, 4, 5, or more) chemically-modified nucleotides or non-nucleotides of Formula II at the 3′-end of the sense strand, the antisense strand, or both strands.

[0080] In one embodiment, the invention features a chemically-modified short interfering nucleic acid (siNA) molecule capable of mediating RNA interference (RNAi) against SARS inside a cell or reconstituted in vitro system, wherein the chemical modification comprises one or more (e.g., about 1, 2, 3, 4, 5, 6, 7, 8, 9, 10, or more) nucleotides or non-nucleotides having Formula III: [chemical structure]
wherein each R3, R4, R5, R6, R7, R8, R10, R11 and R12 is independently H, OH, alkyl, substituted alkyl, alkaryl or aralkyl, F, Cl, Br, CN, CF₃, OCF₃, OCN, O-alkyl, S-alkyl, N-alkyl, O-alkenyl, S-alkenyl, N-alkenyl, SO-alkyl, alkyl-OSH, alkyl-OH, O-alkyl-OH, O-alkyl-SH, S-alkyl-OH, S-alkyl-SH, alkyl-5-alkyl, alkyl-O-alkyl, ONO2, NO2, N3, NH2, aminoalkyl, aminoacid, aminoacyl, ONH2, O-aminoalkyl, O-aminoacid, O-aminoacyl, heterocycloalkyl, heterocycloalkaryl, aminoalkylamino, polyalklylamino, substituted silyl, or group having Formula I or II; R9 is O, S, CH2, S═O, CHF, or CF2, and B is a nucleosidic base such as adenine, guanine, uracil, cytosine, thymine, 2-aminoadenosine, 5-methylcytosine, 2,6-diaminopurine, or any other non-naturally occurring base that can be employed to be complementary or non-complementary to target RNA or a non-nucleosidic base such as phenyl, naphthyl, 3-nitropyrrole, 5-nitroindole, nebularine, pyridone, pyridinone, or any other non-naturally occurring universal base that can be complementary or non-complementary to target RNA.

[0081] The chemically-modified nucleotide or non-nucleotide of Formula III can be present in one or both oligonucleotide strands of the siNA duplex, for example, in the sense strand, the antisense strand, or both strands. The siNA molecules of the invention can comprise one or more chemically-modified nucleotide or non-nucleotide of Formula III at the 3′-end, the 5′-end, or both of the 3′ and 5′-ends of the sense strand, the antisense strand, or both strands. For example, an exemplary siNA molecule of the invention can comprise about 1 to about 5 or more (e.g., about 1, 2, 3, 4, 5, or more) chemically-modified nucleotide(s) or non-nucleotide(s) of Formula III at the 5′-end of the sense strand, the antisense strand, or both strands. In anther non-limiting example, an exemplary siNA molecule of the invention can comprise about 1 to about 5 or more (e.g., about 1, 2, 3, 4, 5, or more) chemically-modified nucleotide or non-nucleotide of Formula III at the 3′-end of the sense strand, the antisense strand, or both strands.

[0082] In another embodiment, a siNA molecule of the invention comprises a nucleotide having Formula II or III, wherein the nucleotide having Formula II or III is in an inverted configuration. For example, the nucleotide having Formula II or III is connected to the siNA construct in a 3′-3′,3′-2′,2′-3′, or 5′-5′ configuration, such as at the 3′-end, the 5′-end, or both of the 3′ and 5′-ends of one or both siNA strands.

[0083] In one embodiment, the invention features a chemically-modified short interfering nucleic acid (siNA) molecule capable of mediating RNA interference (RNAi) against SARS inside a cell or reconstituted in vitro system, wherein the chemical modification comprises a 5′-terminal phosphate group having Formula IV: [chemical structure]
wherein each X and Y is independently O, S, N, alkyl, substituted alkyl, or alkylhalo; wherein each Z and W is independently O, S, N, alkyl, substituted alkyl, O-alkyl, S-alkyl, alkaryl, aralkyl, alkylhalo, or acetyl; and wherein W, X, Y and Z are not all O.

[0084] In one embodiment, the invention features a siNA molecule having a 5′-terminal phosphate group having Formula IV on the target-complementary strand, for example, a strand complementary to a target RNA, wherein the siNA molecule comprises an all RNA siNA molecule. In another embodiment, the invention features a siNA molecule having a 5′-terminal phosphate group having Formula IV on the target-complementary strand wherein the siNA molecule also comprises about 1 to about 3 (e.g., about 1, 2, or 3) nucleotide 3′-terminal nucleotide overhangs having about 1 to about 4 (e.g., about 1, 2, 3, or 4) deoxyribonucleotides on the 3′-end of one or both strands. In another embodiment, a 5′-terminal phosphate group having Formula IV is present on the target-complementary strand of a siNA molecule of the invention, for example a siNA molecule having chemical modifications having any of Formulae I-VII.

[0085] In one embodiment, the invention features a chemically-modified short interfering nucleic acid (siNA) molecule capable of mediating RNA interference (RNAi) against SARS inside a cell or reconstituted in vitro system, wherein the chemical modification comprises one or more phosphorothioate internucleotide linkages. For example, in a non-limiting example, the invention features a chemically-modified short interfering nucleic acid (siNA) having about 1, 2, 3, 4, 5, 6, 7, 8 or more phosphorothioate internucleotide linkages in one siNA strand. In yet another embodiment, the invention features a chemically-modified short interfering nucleic acid (siNA) individually having about 1, 2, 3, 4, 5, 6, 7, 8 or more phosphorothioate internucleotide linkages in both siNA strands. The phosphorothioate internucleotide linkages can be present in one or both oligonucleotide strands of the siNA duplex, for example in the sense strand, the antisense strand, or both strands. The siNA molecules of the invention can comprise one or more phosphorothioate internucleotide linkages at the 3′-end, the 5′-end, or both of the 3′- and 5′-ends of the sense strand, the antisense strand, or both strands. For example, an exemplary siNA molecule of the invention can comprise about 1 to about 5 or more (e.g., about 1, 2, 3, 4, 5, or more) consecutive phosphorothioate internucleotide linkages at the 5′-end of the sense strand, the antisense strand, or both strands. In another non-limiting example, an exemplary siNA molecule of the invention can comprise one or more (e.g., about 1, 2, 3, 4, 5, 6, 7, 8, 9, 10, or more) pyrimidine phosphorothioate internucleotide linkages in the sense strand, the antisense strand, or both strands. In yet another non-limiting example, an exemplary siNA molecule of the invention can comprise one or more (e.g., about 1, 2, 3, 4, 5, 6, 7, 8, 9, 10, or more) purine phosphorothioate internucleotide linkages in the sense strand, the antisense strand, or both strands.

[0086] In one embodiment, the invention features a siNA molecule, wherein the sense strand comprises one or more, for example, about 1, 2, 3, 4, 5, 6, 7, 8, 9, 10, or more phosphorothioate internucleotide linkages, and/or one or more (e.g., about 1, 2, 3, 4, 5, 6, 7, 8, 9, 10 or more) 2′-deoxy, 2′-O-methyl, 2′-deoxy-2′-fluoro, and/or about one or more (e.g., about 1, 2, 3, 4, 5, 6, 7, 8, 9, 10 or more) universal base modified nucleotides, and optionally a terminal cap molecule at the 3′-end, the 5′-end, or both of the 3′- and 5′-ends of the sense strand; and wherein the antisense strand comprises about 1 to about 10 or more, specifically about 1, 2, 3, 4, 5, 6, 7, 8, 9, 10, or more phosphorothioate internucleotide linkages, and/or one or more (e.g., about 1, 2, 3, 4, 5, 6, 7, 8, 9, 10 or more) 2′-deoxy, 2′-O-methyl, 2′-deoxy-2′-fluoro, and/or one or more (e.g., about 1, 2, 3, 4, 5, 6, 7, 8, 9, 10 or more) universal base modified nucleotides, and optionally a terminal cap molecule at the 3′-end, the 5′-end, or both of the 3′- and 5′-ends of the antisense strand. In another embodiment, one or more, for example about 1, 2, 3, 4, 5, 6, 7, 8, 9, 10, or more, pyrimidine nucleotides of the sense and/or antisense siNA strand are chemically-modified with 2′-deoxy, 2′-O-methyl and/or 2′-deoxy-2′-fluoro nucleotides, with or without one or more, for example about 1, 2, 3, 4, 5, 6, 7, 8, 9, 10, or more, phosphorothioate internucleotide linkages and/or a terminal cap molecule at the 3′-end, the 5′-end, or both of the 3′- and 5′-ends, being present in the same or different strand.

[0087] In another embodiment, the invention features a siNA molecule, wherein the sense strand comprises about 1 to about 5, specifically about 1, 2, 3, 4, or 5 phosphorothioate internucleotide linkages, and/or one or more (e.g., about 1, 2, 3, 4, 5, or more) 2′-deoxy, 2′-O-methyl, 2′-deoxy-2′-fluoro, and/or one or more (e.g., about 1, 2, 3, 4, 5, or more) universal base modified nucleotides, and optionally a terminal cap molecule at the 3-end, the 5′-end, or both of the 3′- and 5′-ends of the sense strand; and wherein the antisense strand comprises about 1 to about 5 or more, specifically about 1, 2, 3, 4, 5, or more phosphorothioate internucleotide linkages, and/or one or more (e.g., about 1, 2, 3, 4, 5, 6, 7, 8, 9, 10 or more) 2′-deoxy, 2′-O-methyl, 2′-deoxy-2′-fluoro, and/or one or more (e.g., about 1, 2, 3, 4, 5, 6, 7, 8, 9, 10 or more) universal base modified nucleotides, and optionally a terminal cap molecule at the 3′-end, the 5′-end, or both of the 3′- and 5′-ends of the antisense strand. In another embodiment, one or more, for example about 1, 2, 3, 4, 5, 6, 7, 8, 9, 10, or more, pyrimidine nucleotides of the sense and/or antisense siNA strand are chemically-modified with 2′-deoxy, 2′-O-methyl and/or 2′-deoxy-2′-fluoro nucleotides, with or without about 1 to about 5 or more, for example about 1, 2, 3, 4, 5, or more phosphorothioate internucleotide linkages and/or a terminal cap molecule at the 3′-end, the 5′-end, or both of the 3′- and 5′-ends, being present in the same or different strand.

[0088] In one embodiment, the invention features a siNA molecule, wherein the antisense strand comprises one or more, for example, about 1, 2, 3, 4, 5, 6, 7, 8, 9, 10, or more phosphorothioate internucleotide linkages, and/or about one or more (e.g., about 1, 2, 3, 4, 5, 6, 7, 8, 9, 10 or more) 2′-deoxy, 2′-O-methyl, 2′-deoxy-2′-fluoro, and/or one or more (e.g., about 1, 2, 3, 4, 5, 6, 7, 8, 9, 10 or more) universal base modified nucleotides, and optionally a terminal cap molecule at the 3′-end, the 5′-end, or both of the 3′- and 5′-ends of the sense strand; and wherein the antisense strand comprises about 1 to about 10 or more, specifically about 1, 2, 3, 4, 5, 6, 7, 8, 9, 10 or more phosphorothioate internucleotide linkages, and/or one or more (e.g., about 1, 2, 3, 4, 5, 6, 7, 8, 9, 10 or more) 2′-deoxy, 2′-O-methyl, 2′-deoxy-2′-fluoro, and/or one or more (e.g., about 1, 2, 3, 4, 5, 6, 7, 8, 9, 10 or more) universal base modified nucleotides, and optionally a terminal cap molecule at the 3′-end, the 5′-end, or both of the 3′- and 5′-ends of the antisense strand. In another embodiment, one or more, for example about 1, 2, 3, 4, 5, 6, 7, 8, 9, 10 or more pyrimidine nucleotides of the sense and/or antisense siNA strand are chemically-modified with 2′-deoxy, 2′-O-methyl and/or 2′-deoxy-2′-fluoro nucleotides, with or without one or more, for example, about 1, 2, 3, 4, 5, 6, 7, 8, 9, 10 or more phosphorothioate internucleotide linkages and/or a terminal cap molecule at the 3′-end, the 5′-end, or both of the 3′ and 5′-ends, being present in the same or different strand.

[0089] In another embodiment, the invention features a siNA molecule, wherein the antisense strand comprises about 1 to about 5 or more, specifically about 1, 2, 3, 4, 5 or more phosphorothioate internucleotide linkages, and/or one or more (e.g., about 1, 2, 3, 4, 5, 6, 7, 8, 9, 10 or more) 2′-deoxy, 2′-O-methyl, 2′-deoxy-2′-fluoro, and/or one or more (e.g., about 1, 2, 3, 4, 5, 6, 7, 8, 9, 10 or more) universal base modified nucleotides, and optionally a terminal cap molecule at the 3′-end, the 5′-end, or both of the 3′- and 5′-ends of the sense strand; and wherein the antisense strand comprises about 1 to about 5 or more, specifically about 1, 2, 3, 4, 5 or more phosphorothioate internucleotide linkages, and/or one or more (e.g., about 1, 2, 3, 4, 5, 6, 7, 8, 9, 10 or more) 2′-deoxy, 2′-O-methyl, 2′-deoxy-2′-fluoro, and/or one or more (e.g., about 1, 2, 3, 4, 5, 6, 7, 8, 9, 10 or more) universal base modified nucleotides, and optionally a terminal cap molecule at the 3′-end, the 5′-end, or both of the 3′- and 5′-ends of the antisense strand. In another embodiment, one or more, for example about 1, 2, 3, 4, 5, 6, 7, 8, 9, 10 or more pyrimidine nucleotides of the sense and/or antisense siNA strand are chemically-modified with 2′-deoxy, 2′-O-methyl and/or 2′-deoxy-2′-fluoro nucleotides, with or without about 1 to about 5, for example about 1, 2, 3, 4, 5 or more phosphorothioate internucleotide linkages and/or a terminal cap molecule at the 3′-end, the 5′-end, or both of the 3′- and 5′-ends, being present in the same or different strand.

[0090] In one embodiment, the invention features a chemically-modified short interfering nucleic acid (siNA) molecule having about 1 to about 5, specifically about 1, 2, 3, 4, 5 or more phosphorothioate internucleotide linkages in each strand of the siNA molecule.

[0091] In another embodiment, the invention features a siNA molecule comprising 2′-5′ internucleotide linkages. The 2′-5′ internucleotide linkage(s) can be at the 3′-end, the 5′-end, or both of the 3′- and 5′-ends of one or both siNA sequence strands. In addition, the 2′-5′ internucleotide linkage(s) can be present at various other positions within one or both siNA sequence strands, for example, about 1, 2, 3, 4, 5, 6, 7, 8, 9, 10, or more including every internucleotide linkage of a pyrimidine nucleotide in one or both strands of the siNA molecule can comprise a 2′-5′ internucleotide linkage, or about 1, 2, 3, 4, 5, 6, 7, 8, 9, 10, or more including every internucleotide linkage of a purine nucleotide in one or both strands of the siNA molecule can comprise a 2′-5′ internucleotide linkage.

[0092] In another embodiment, a chemically-modified siNA molecule of the invention comprises a duplex having two strands, one or both of which can be chemically-modified, wherein each strand is about 18 to about 27 (e.g., about 18, 19, 20, 21, 22, 23, 24, 25, 26, or 27) nucleotides in length, wherein the duplex has about 18 to about 23 (e.g., about 18, 19, 20, 21, 22, or 23) base pairs, and wherein the chemical modification comprises a structure having any of Formulae I-VII. For example, an exemplary chemically-modified siNA molecule of the invention comprises a duplex having two strands, one or both of which can be chemically-modified with a chemical modification having any of Formulae I-VII or any combination thereof, wherein each strand consists of about 21 nucleotides, each having a 2-nucleotide 3′-terminal nucleotide overhang, and wherein the duplex has about 19 base pairs. In another embodiment, a siNA molecule of the invention comprises a single stranded hairpin structure, wherein the siNA is about 36 to about 70 (e.g., about 36, 40, 45, 50, 55, 60, 65, or 70) nucleotides in length having about 18 to about 23 (e.g., about 18, 19, 20, 21, 22, or 23) base pairs, and wherein the siNA can include a chemical modification comprising a structure having any of Formulae I-VII or any combination thereof. For example, an exemplary chemically-modified siNA molecule of the invention comprises a linear oligonucleotide having about 42 to about 50 (e.g., about 42, 43, 44, 45, 46, 47, 48, 49, or 50) nucleotides that is chemically-modified with a chemical modification having any of Formulae I-VII or any combination thereof, wherein the linear oligonucleotide forms a hairpin structure having about 19 base pairs and a 2-nucleotide 3′-terminal nucleotide overhang. In another embodiment, a linear hairpin siNA molecule of the invention contains a stem loop motif, wherein the loop portion of the siNA molecule is biodegradable. For example, a linear hairpin siNA molecule of the invention is designed such that degradation of the loop portion of the siNA molecule in vivo can generate a double-stranded siNA molecule with 3′-terminal overhangs, such as 3′-terminal nucleotide overhangs comprising about 2 nucleotides.

[0093] In another embodiment, a siNA molecule of the invention comprises a hairpin structure, wherein the siNA is about 25 to about 50 (e.g., about 25, 26, 27, 28, 29, 30, 31, 32, 33, 34, 35, 36, 37, 38, 39, 40, 41, 42, 43, 44, 45, 46, 47, 48, 49, or 50) nucleotides in length having about 3 to about 25 (e.g., about 3, 4, 5, 6, 7, 8, 9, 10, 11, 12, 13, 14, 15, 16, 17, 18, 19, 20, 21, 22, 23, 24, or 25) base pairs, and wherein the siNA can include one or more chemical modifications comprising a structure having any of Formulae I-VII or any combination thereof. For example, an exemplary chemically-modified siNA molecule of the invention comprises a linear oligonucleotide having about 25 to about 35 (e.g., about 25, 26, 27, 28, 29, 30, 31, 32, 33, 34, or 35) nucleotides that is chemically-modified with one or more chemical modifications having any of Formulae I-VII or any combination thereof, wherein the linear oligonucleotide forms a hairpin structure having about 3 to about 23 (e.g., about 3, 4, 5, 6, 7, 8, 9, 10, 11, 12, 13, 14, 15, 16, 17, 18, 19, 20, 21, 22, or 23) base pairs and a 5′-terminal phosphate group that can be chemically modified as described herein (for example a 5′-terminal phosphate group having Formula IV). In another embodiment, a linear hairpin siNA molecule of the invention contains a stem loop motif, wherein the loop portion of the siNA molecule is biodegradable. In another embodiment, a linear hairpin siNA molecule of the invention comprises a loop portion comprising a non-nucleotide linker.

[0094] In another embodiment, a siNA molecule of the invention comprises an asymmetric hairpin structure, wherein the siNA is about 25 to about 50 (e.g., about 25, 26, 27, 28, 29, 30, 31, 32, 33, 34, 35, 36, 37, 38, 39, 40, 41, 42, 43, 44, 45, 46, 47, 48, 49, or 50) nucleotides in length having about 3 to about 20 (e.g., about 3, 4, 5, 6, 7, 8, 9, 10, 11, 12, 13, 14, 15, 16, 17, 18, 19, or 20) base pairs, and wherein the siNA can include one or more chemical modifications comprising a structure having any of Formulae I-VII or any combination thereof. For example, an exemplary chemically-modified siNA molecule of the invention comprises a linear oligonucleotide having about 25 to about 35 (e.g., about 25, 26, 27, 28, 29, 30, 31, 32, 33, 34, or 35) nucleotides that is chemically-modified with one or more chemical modifications having any of Formulae I-VII or any combination thereof, wherein the linear oligonucleotide forms an asymmetric hairpin structure having about 3 to about 18 (e.g., about 3, 4, 5, 6, 7, 8, 9, 10, 11, 12, 13, 14, 15, 16, 17 or 18) base pairs and a 5′-terminal phosphate group that can be chemically modified as described herein (for example a 5′-terminal phosphate group having Formula IV). In another embodiment, an asymmetric hairpin siNA molecule of the invention contains a stem loop motif, wherein the loop portion of the siNA molecule is biodegradable. In another embodiment, an asymmetric hairpin siNA molecule of the invention comprises a loop portion comprising a non-nucleotide linker.

[0095] In another embodiment, a siNA molecule of the invention comprises an asymmetric double stranded structure having separate polynucleotide strands comprising sense and antisense regions, wherein the antisense region is about 16 to about 25 (e.g., about 16, 17, 18, 19, 20, 21, 22, 23, 24, or 25) nucleotides in length, wherein the sense region is about 3 to about 18 (e.g., about 3, 4, 5, 6, 7, 8, 9, 10, 11, 12, 13, 14, 15, 16, 17, or 18) nucleotides in length, wherein the sense region and the antisense region have at least 3 complementary nucleotides, and wherein the siNA can include one or more chemical modifications comprising a structure having any of Formulae I-VII or any combination thereof. For example, an exemplary chemically-modified siNA molecule of the invention comprises an asymmetric double stranded structure having separate polynucleotide strands comprising sense and antisense regions, wherein the antisense region is about 18 to about 22 (e.g., about 18, 19, 20, 21, or 22) nucleotides in length and wherein the sense region is about 3 to about 15 (e.g., about 3, 4, 5, 6, 7, 8, 9, 10, II, 12, 13, 14, or 15) nucleotides in length, wherein the sense region the antisense region have at least 3 complementary nucleotides, and wherein the siNA can include one or more chemical modifications comprising a structure having any of Formulae I-VII or any combination thereof. In another embodiment, the asymmetic double stranded siNA molecule can also have a 5′-terminal phosphate group that can be chemically modified as described herein (for example a 5′-terminal phosphate group having Formula IV).

[0096] In another embodiment, a siNA molecule of the invention comprises a circular nucleic acid molecule, wherein the siNA is about 38 to about 70 (e.g., about 38, 40, 45, 50, 55, 60, 65, or 70) nucleotides in length having about 18 to about 23 (e.g., about 18, 19, 20, 21, 22, or 23) base pairs, and wherein the siNA can include a chemical modification, which comprises a structure having any of Formulae I-VII or any combination thereof. For example, an exemplary chemically-modified siNA molecule of the invention comprises a circular oligonucleotide having about 42 to about 50 (e.g., about 42, 43, 44, 45, 46, 47, 48, 49, or 50) nucleotides that is chemically-modified with a chemical modification having any of Formulae I-VII or any combination thereof, wherein the circular oligonucleotide forms a dumbbell shaped structure having about 19 base pairs and 2 loops.

[0097] In another embodiment, a circular siNA molecule of the invention contains two loop motifs, wherein one or both loop portions of the siNA molecule is biodegradable. For example, a circular siNA molecule of the invention is designed such that degradation of the loop portions of the siNA molecule in vivo can generate a double-stranded siNA molecule with 3′-terminal overhangs, such as 3′-terminal nucleotide overhangs comprising about 2 nucleotides.

[0098] In one embodiment, a siNA molecule of the invention comprises at least one (e.g., about 1, 2, 3, 4, 5, 6, 7, 8, 9, 10, or more) abasic moiety, for example a compound having

[0099] Formula V: [chemical structure]
wherein each R3, R4, R5, R6, R7, R8, R10, R11, R12, and R13 is independently H, OH, alkyl, substituted alkyl, alkaryl or aralkyl, F, Cl, Br, CN, CF₃, OCF₃, OCN, O-alkyl, S-alkyl, N-alkyl, O-alkenyl, S-alkenyl, N-alkenyl, SO-alkyl, alkyl-OSH, alkyl-OH, O-alkyl-OH, O-alkyl-SH, S-alkyl-OH, S-alkyl-SH, alkyl-5-alkyl, alkyl-O-alkyl, ONO2, NO₂, N3, NH₂, aminoalkyl, aminoacid, aminoacyl, ONH2, O-aminoalkyl, O-aminoacid, O-aminoacyl, heterocycloalkyl, heterocycloalkaryl, aminoalkylamino, polyalklylamino, substituted silyl, or group having Formula I or II; R9 is O, S, CH₂, S═O, CHF, or CF₂.

[0100] In one embodiment, a siNA molecule of the invention comprises at least one (e.g., about 1, 2, 3, 4, 5, 6, 7, 8, 9, 10, or more) inverted abasic moiety, for example a compound having Formula VI: [chemical structure]
wherein each R3, R4, R5, R6, R7, R8, R10, R11, R12, and R13 is independently H, OH, alkyl, substituted alkyl, alkaryl or aralkyl, F, Cl, Br, CN, CF3, OCF3, OCN, O-alkyl, S-alkyl, N-alkyl, O-alkenyl, S-alkenyl, N-alkenyl, SO-alkyl, alkyl-OSH, alkyl-OH, O-alkyl-OH, O-alkyl-SH, S-alkyl-OH, S-alkyl-SH, alkyl-5-alkyl, alkyl-O-alkyl, ONO2, NO2, N3, NH2, aminoalkyl, aminoacid, aminoacyl, ONH2, O-aminoalkyl, O-aminoacid, O-aminoacyl, heterocycloalkyl, heterocycloalkaryl, aminoalkylamino, polyalklylamino, substituted silyl, or group having Formula I or II; R9 is O, S, CH₂, S═O, CHF, or CF₂, and either R2, R3, R8 or R13 serve as points of attachment to the siNA molecule of the invention.

[0101] In another embodiment, a siNA molecule of the invention comprises at least one (e.g., about 1, 2, 3, 4, 5, 6, 7, 8, 9, 10, or more) substituted polyalkyl moieties, for example a compound having Formula VII:

[chemical structure]

[0102] wherein each n is independently an integer from 1 to 12, each R1, R2 and R3 is independently H, OH, alkyl, substituted alkyl, alkaryl or aralkyl, F, Cl, Br, CN, CF3, OCF3, OCN, O-alkyl, S-alkyl, N-alkyl, O-alkenyl, S-alkenyl, N-alkenyl, SO-alkyl, alkyl-OSH, alkyl-OH, O-alkyl-OH, O-alkyl-SH, S-alkyl-OH, S-alkyl-SH, alkyl-5-alkyl, alkyl-O-alkyl, ONO2, NO2, N3, NH2, aminoalkyl, aminoacid, aminoacyl, ONH2, O-aminoalkyl, O-aminoacid, O-aminoacyl, heterocycloalkyl, heterocycloalkaryl, aminoalkylamino, polyalklylamino, substituted silyl, or a group having Formula I, and R1, R2 or R3 serves as points of attachment to the siNA molecule of the invention.

[0103] In another embodiment, the invention features a compound having Formula VII, wherein R1 and R2 are hydroxyl (OH) groups, n=1, and R3 comprises O and is the point of attachment to the 3′-end, the 5′-end, or both of the 3′ and 5′-ends of one or both strands of a double-stranded siNA molecule of the invention or to a single-stranded siNA molecule of the invention. This modification is referred to herein as “glyceryl” (for example modification 6 in FIG. 10).

[0104] In another embodiment, a moiety having any of Formula V, VI or VII of the invention is at the 3′-end, the 5′-end, or both of the 3′ and 5′-ends of a siNA molecule of the invention. For example, a moiety having Formula V, VI or VII can be present at the 3′-end, the 5′-end, or both of the 3′ and 5′-ends of the antisense strand, the sense strand, or both antisense and sense strands of the siNA molecule. In addition, a moiety having Formula VII can be present at the 3′-end or the 5′-end of a hairpin siNA molecule as described herein.

[0105] In another embodiment, a siNA molecule of the invention comprises an abasic residue having Formula V or VI, wherein the abasic residue having Formula VI or VI is connected to the siNA construct in a 3′-3′,3′-2′,2′-3′, or 5′-5′ configuration, such as at the 3′-end, the 5′-end, or both of the 3′ and 5′-ends of one or both siNA strands.

[0106] In one embodiment, a siNA molecule of the invention comprises one or more (e.g., about 1, 2, 3, 4, 5, 6, 7, 8, 9, 10, or more) locked nucleic acid (LNA) nucleotides, for example at the 5′-end, the 3′-end, both of the 5′ and 3′-ends, or any combination thereof, of the siNA molecule.

[0107] In another embodiment, a siNA molecule of the invention comprises one or more (e.g., about 1, 2, 3, 4, 5, 6, 7, 8, 9, 10, or more) acyclic nucleotides, for example at the 5′-end, the 3′-end, both of the 5′ and 3′-ends, or any combination thereof, of the siNA molecule.

[0108] In one embodiment, the invention features a chemically-modified short interfering nucleic acid (siNA) molecule of the invention comprising a sense region, wherein any (e.g., one or more or all) pyrimidine nucleotides present in the sense region are 2′-deoxy-2′-fluoro pyrimidine nucleotides (e.g., wherein all pyrimidine nucleotides are 2′-deoxy-2′-fluoro pyrimidine nucleotides or alternately a plurality of pyrimidine nucleotides are 2′-deoxy-2′-fluoro pyrimidine nucleotides), and wherein any (e.g., one or more or all) purine nucleotides present in the sense region are 2′-deoxy purine nucleotides (e.g., wherein all purine nucleotides are 2′-deoxy purine nucleotides or alternately a plurality of purine nucleotides are 2′-deoxy purine nucleotides).

[0109] In one embodiment, the invention features a chemically-modified short interfering nucleic acid (siNA) molecule of the invention comprising a sense region, wherein any (e.g., one or more or all) pyrimidine nucleotides present in the sense region are 2′-deoxy-2′-fluoro pyrimidine nucleotides (e.g., wherein all pyrimidine nucleotides are 2′-deoxy-2′-fluoro pyrimidine nucleotides or alternately a plurality of pyrimidine nucleotides are 2′-deoxy-2′-fluoro pyrimidine nucleotides), and wherein any (e.g., one or more or all) purine nucleotides present in the sense region are 2′-deoxy purine nucleotides (e.g., wherein all purine nucleotides are 2′-deoxy purine nucleotides or alternately a plurality of purine nucleotides are 2′-deoxy purine nucleotides), wherein any nucleotides comprising a 3′-terminal nucleotide overhang that are present in said sense region are 2′-deoxy nucleotides.

[0110] In one embodiment, the invention features a chemically-modified short interfering nucleic acid (siNA) molecule of the invention comprising a sense region, wherein any (e.g., one or more or all) pyrimidine nucleotides present in the sense region are 2′-deoxy-2′-fluoro pyrimidine nucleotides (e.g., wherein all pyrimidine nucleotides are 2′-deoxy-2′-fluoro pyrimidine nucleotides or alternately a plurality of pyrimidine nucleotides are 2′-deoxy-2′-fluoro pyrimidine nucleotides), and wherein any (e.g., one or more or all) purine nucleotides present in the sense region are 2′-O-methyl purine nucleotides (e.g., wherein all purine nucleotides are 2′-O-methyl purine nucleotides or alternately a plurality of purine nucleotides are 2′-O-methyl purine nucleotides).

[0111] In one embodiment, the invention features a chemically-modified short interfering nucleic acid (siNA) molecule of the invention comprising a sense region, wherein any (e.g., one or more or all) pyrimidine nucleotides present in the sense region are 2′-deoxy-2′-fluoro pyrimidine nucleotides (e.g., wherein all pyrimidine nucleotides are 2′-deoxy-2′-fluoro pyrimidine nucleotides or alternately a plurality of pyrimidine nucleotides are 2′-deoxy-2′-fluoro pyrimidine nucleotides), wherein any (e.g., one or more or all) purine nucleotides present in the sense region are 2′-O-methyl purine nucleotides (e.g., wherein all purine nucleotides are 2′-O-methyl purine nucleotides or alternately a plurality of purine nucleotides are 2′-O-methyl purine nucleotides), and wherein any nucleotides comprising a 3′-terminal nucleotide overhang that are present in said sense region are 2′-deoxy nucleotides.

[0112] In one embodiment, the invention features a chemically-modified short interfering nucleic acid (siNA) molecule of the invention comprising an antisense region, wherein any (e.g., one or more or all) pyrimidine nucleotides present in the antisense region are 2′-deoxy-2′-fluoro pyrimidine nucleotides (e.g., wherein all pyrimidine nucleotides are 2′-deoxy-2′-fluoro pyrimidine nucleotides or alternately a plurality of pyrimidine nucleotides are 2′-deoxy-2′-fluoro pyrimidine nucleotides), and wherein any (e.g., one or more or all) purine nucleotides present in the antisense region are 2′-O-methyl purine nucleotides (e.g., wherein all purine nucleotides are 2′-O-methyl purine nucleotides or alternately a plurality of purine nucleotides are 2′-O-methyl purine nucleotides).

[0113] In one embodiment, the invention features a chemically-modified short interfering nucleic acid (siNA) molecule of the invention comprising an antisense region, wherein any (e.g., one or more or all) pyrimidine nucleotides present in the antisense region are 2′-deoxy-2′-fluoro pyrimidine nucleotides (e.g., wherein all pyrimidine nucleotides are 2′-deoxy-2′-fluoro pyrimidine nucleotides or alternately a plurality of pyrimidine nucleotides are 2′-deoxy-2′-fluoro pyrimidine nucleotides), wherein any (e.g., one or more or all) purine nucleotides present in the antisense region are 2′-O-methyl purine nucleotides (e.g., wherein all purine nucleotides are 2′-O-methyl purine nucleotides or alternately a plurality of purine nucleotides are 2′-O-methyl purine nucleotides), and wherein any nucleotides comprising a 3′-terminal nucleotide overhang that are present in said antisense region are 2′-deoxy nucleotides.

[0114] In one embodiment, the invention features a chemically-modified short interfering nucleic acid (siNA) molecule of the invention comprising an antisense region, wherein any (e.g., one or more or all) pyrimidine nucleotides present in the antisense region are 2′-deoxy-2′-fluoro pyrimidine nucleotides (e.g., wherein all pyrimidine nucleotides are 2′-deoxy-2′-fluoro pyrimidine nucleotides or alternately a plurality of pyrimidine nucleotides are 2′-deoxy-2′-fluoro pyrimidine nucleotides), and wherein any (e.g., one or more or all) purine nucleotides present in the antisense region are 2′-deoxy purine nucleotides (e.g., wherein all purine nucleotides are 2′-deoxy purine nucleotides or alternately a plurality of purine nucleotides are 2′-deoxy purine nucleotides).

[0115] In one embodiment, the invention features a chemically-modified short interfering nucleic acid (siNA) molecule of the invention comprising an antisense region, wherein any (e.g., one or more or all) pyrimidine nucleotides present in the antisense region are 2′-deoxy-2′-fluoro pyrimidine nucleotides (e.g., wherein all pyrimidine nucleotides are 2′-deoxy-2′-fluoro pyrimidine nucleotides or alternately a plurality of pyrimidine nucleotides are 2′-deoxy-2′-fluoro pyrimidine nucleotides), and wherein any (e.g., one or more or all) purine nucleotides present in the antisense region are 2′-O-methyl purine nucleotides (e.g., wherein all purine nucleotides are 2′-O-methyl purine nucleotides or alternately a plurality of purine nucleotides are 2′-O-methyl purine nucleotides).

[0116] In one embodiment, the invention features a chemically-modified short interfering nucleic acid (siNA) molecule of the invention capable of mediating RNA interference (RNAi) against SARS inside a cell or reconstituted in vitro system comprising a sense region, wherein one or more pyrimidine nucleotides present in the sense region are 2′-deoxy-2′-fluoro pyrimidine nucleotides (e.g., wherein all pyrimidine nucleotides are 2′-deoxy-2′-fluoro pyrimidine nucleotides or alternately a plurality of pyrimidine nucleotides are 2′-deoxy-2′-fluoro pyrimidine nucleotides), and one or more purine nucleotides present in the sense region are 2′-deoxy purine nucleotides (e.g., wherein all purine nucleotides are 2′-deoxy purine nucleotides or alternately a plurality of purine nucleotides are 2′-deoxy purine nucleotides), and an antisense region, wherein one or more pyrimidine nucleotides present in the antisense region are 2′-deoxy-2′-fluoro pyrimidine nucleotides (e.g., wherein all pyrimidine nucleotides are 2′-deoxy-2′-fluoro pyrimidine nucleotides or alternately a plurality of pyrimidine nucleotides are 2′-deoxy-2′-fluoro pyrimidine nucleotides), and one or more purine nucleotides present in the antisense region are 2′-O-methyl purine nucleotides (e.g., wherein all purine nucleotides are 2′-O-methyl purine nucleotides or alternately a plurality of purine nucleotides are 2′-O-methyl purine nucleotides). The sense region and/or the antisense region can have a terminal cap modification, such as any modification described herein or shown in FIG. 10, that is optionally present at the 3′-end, the 5′-end, or both of the 3′ and 5′-ends of the sense and/or antisense sequence. The sense and/or antisense region can optionally further comprise a 3′-terminal nucleotide overhang having about 1 to about 4 (e.g., about 1, 2, 3, or 4) 2′-deoxynucleotides. The overhang nucleotides can further comprise one or more (e.g., about 1, 2, 3, 4 or more) phosphorothioate, phosphonoacetate, and/or thiophosphonoacetate internucleotide linkages. Non-limiting examples of these chemically-modified siNAs are shown in FIGS. 4 and 5 and Tables III and IV herein.

[0117] In any of these described embodiments, the purine nucleotides present in the sense region are alternatively 2′-O-methyl purine nucleotides (e.g., wherein all purine nucleotides are 2′-O-methyl purine nucleotides or alternately a plurality of purine nucleotides are 2′-O-methyl purine nucleotides) and one or more purine nucleotides present in the antisense region are 2′-O-methyl purine nucleotides (e.g., wherein all purine nucleotides are 2′-O-methyl purine nucleotides or alternately a plurality of purine nucleotides are 2′-O-methyl purine nucleotides). Also, in any of these embodiments, one or more purine nucleotides present in the sense region are alternatively purine ribonucleotides (e.g., wherein all purine nucleotides are purine ribonucleotides or alternately a plurality of purine nucleotides are purine ribonucleotides) and any purine nucleotides present in the antisense region are 2′-O-methyl purine nucleotides (e.g., wherein all purine nucleotides are 2′-O-methyl purine nucleotides or alternately a plurality of purine nucleotides are 2′-O-methyl purine nucleotides). Additionally, in any of these embodiments, one or more purine nucleotides present in the sense region and/or present in the antisense region are alternatively selected from the group consisting of 2′-deoxy nucleotides, locked nucleic acid (LNA) nucleotides, 2′-methoxyethyl nucleotides, 4′-thionucleotides, and 2′-O-methyl nucleotides (e.g., wherein all purine nucleotides are selected from the group consisting of 2′-deoxy nucleotides, locked nucleic acid (LNA) nucleotides, 2′-methoxyethyl nucleotides, 4′-thionucleotides, and 2′-O-methyl nucleotides or alternately a plurality of purine nucleotides are selected from the group consisting of 2′-deoxy nucleotides, locked nucleic acid (LNA) nucleotides, 2′-methoxyethyl nucleotides, 4′-thionucleotides, and 2′-O-methyl nucleotides).

[0118] In another embodiment, any modified nucleotides present in the siNA molecules of the invention, preferably in the antisense strand of the siNA molecules of the invention, but also optionally in the sense and/or both antisense and sense strands, comprise modified nucleotides having properties or characteristics similar to naturally occurring ribonucleotides. For example, the invention features siNA molecules including modified nucleotides having a Northern conformation (e.g., Northern pseudorotation cycle, see for example Saenger, Principles of Nucleic Acid Structure, Springer-Verlag ed., 1984). As such, chemically modified nucleotides present in the siNA molecules of the invention, preferably in the antisense strand of the siNA molecules of the invention, but also optionally in the sense and/or both antisense and sense strands, are resistant to nuclease degradation while at the same time maintaining the capacity to mediate RNAi. Non-limiting examples of nucleotides having a northern configuration include locked nucleic acid (LNA) nucleotides (e.g., 2′-O, 4′-C-methylene-(D-ribofuranosyl) nucleotides); 2′-methoxyethoxy (MOE) nucleotides; 2′-methyl-thio-ethyl, 2′-deoxy-2′-fluoro nucleotides, 2′-deoxy-2′-chloro nucleotides, 2′-azido nucleotides, and 2′-O-methyl nucleotides.

[0119] In one embodiment, the sense strand of a double stranded siNA molecule of the invention comprises a terminal cap moiety, (see for example FIG. 10) such as an inverted deoxyabaisc moiety, at the 3′-end, 5′-end, or both 3′ and 5′-ends of the sense strand.

[0120] In one embodiment, the invention features a chemically-modified short interfering nucleic acid molecule (siNA) capable of mediating RNA interference (RNAi) against SARS inside a cell or reconstituted in vitro system, wherein the chemical modification comprises a conjugate covalently attached to the chemically-modified siNA molecule. Non-limiting examples of conjugates contemplated by the invention include conjugates and ligands described in Vargeese et al, U.S. Ser. No. 10/427,160, filed Apr. 30, 2003, incorporated by reference herein in its entirety, including the drawings. In another embodiment, the conjugate is covalently attached to the chemically-modified siNA molecule via a biodegradable linker. In one embodiment, the conjugate molecule is attached at the 3′-end of either the sense strand, the antisense strand, or both strands of the chemically-modified siNA molecule. In another embodiment, the conjugate molecule is attached at the 5′-end of either the sense strand, the antisense strand, or both strands of the chemically-modified siNA molecule. In yet another embodiment, the conjugate molecule is attached both the 3′-end and 5′-end of either the sense strand, the antisense strand, or both strands of the chemically-modified siNA molecule, or any combination thereof. In one embodiment, a conjugate molecule of the invention comprises a molecule that facilitates delivery of a chemically-modified siNA molecule into a biological system, such as a cell. In another embodiment, the conjugate molecule attached to the chemically-modified siNA molecule is a polyethylene glycol, human serum albumin, or a ligand for a cellular receptor that can mediate cellular uptake. Examples of specific conjugate molecules contemplated by the instant invention that can be attached to chemically-modified siNA molecules are described in Vargeese et al., U.S. Ser. No. 10/201,394, filed Jul. 22, 2002, incorporated by reference herein. The type of conjugates used and the extent of conjugation of siNA molecules of the invention can be evaluated for improved pharmacokinetic profiles, bioavailability, and/or stability of siNA constructs while at the same time maintaining the ability of the siNA to mediate RNAi activity. As such, one skilled in the art can screen siNA constructs that are modified with various conjugates to determine whether the siNA conjugate complex possesses improved properties while maintaining the ability to mediate RNAi, for example in animal models as are generally known in the art.

[0121] In one embodiment, the invention features a short interfering nucleic acid (siNA) molecule of the invention, wherein the siNA further comprises a nucleotide, non-nucleotide, or mixed nucleotide/non-nucleotide linker that joins the sense region of the siNA to the antisense region of the siNA. In one embodiment, a nucleotide linker of the invention can be a linker of >2 nucleotides in length, for example about 3, 4, 5, 6, 7, 8, 9, or 10 nucleotides in length. In another embodiment, the nucleotide linker can be a nucleic acid aptamer. By “aptamer” or “nucleic acid aptamer” as used herein is meant a nucleic acid molecule that binds specifically to a target molecule wherein the nucleic acid molecule has sequence that comprises a sequence recognized by the target molecule in its natural setting. Alternately, an aptamer can be a nucleic acid molecule that binds to a target molecule where the target molecule does not naturally bind to a nucleic acid. The target molecule can be any molecule of interest. For example, the aptamer can be used to bind to a ligand-binding domain of a protein, thereby preventing interaction of the naturally occurring ligand with the protein. This is a non-limiting example and those in the art will recognize that other embodiments can be readily generated using techniques generally known in the art. (See, for example, Gold et al., 1995, Annu. Rev. Biochem., 64, 763; Brody and Gold, 2000, J. Biotechnol., 74, 5; Sun, 2000, Curr. Opin. Mol. Ther., 2, 100; Kusser, 2000, J. Biotechnol., 74, 27; Hermann and Patel, 2000, Science, 287, 820; and Jayasena, 1999, Clinical Chemistry, 45, 1628.)

[0122] In yet another embodiment, a non-nucleotide linker of the invention comprises abasic nucleotide, polyether, polyamine, polyamide, peptide, carbohydrate, lipid, polyhydrocarbon, or other polymeric compounds (e.g. polyethylene glycols such as those having between 2 and 100 ethylene glycol units). Specific examples include those described by Seela and Kaiser, Nucleic Acids Res. 1990, 18:6353 and Nucleic Acids Res. 1987, 15:3113; Cload and Schepartz, J. Am. Chem. Soc. 1991, 113:6324; Richardson and Schepartz, J. Am. Chem. Soc. 1991, 113:5109; Ma et al., Nucleic Acids Res. 1993, 21:2585 and Biochemistry 1993, 32:1751; Durand et al., Nucleic Acids Res. 1990, 18:6353; McCurdy et al., Nucleosides & Nucleotides 1991, 10:287; Jschke et al., Tetrahedron Lett. 1993, 34:301; Ono et al., Biochemistry 1991, 30:9914; Arnold et al., International Publication No. WO 89/02439; Usman et al, International Publication No. WO 95/06731; Dudycz et al., International Publication No. WO 95/11910 and Ferentz and Verdine, J. Am. Chem. Soc. 1991, 113:4000, all hereby incorporated by reference herein. A “non-nucleotide” further means any group or compound that can be incorporated into a nucleic acid chain in the place of one or more nucleotide units, including either sugar and/or phosphate substitutions, and allows the remaining bases to exhibit their enzymatic activity. The group or compound can be abasic in that it does not contain a commonly recognized nucleotide base, such as adenosine, guanine, cytosine, uracil or thymine, for example at the C1 position of the sugar.

[0123] In one embodiment, the invention features a short interfering nucleic acid (siNA) molecule capable of mediating RNA interference (RNAi) inside a cell or reconstituted in vitro system, wherein one or both strands of the siNA molecule that are assembled from two separate oligonucleotides do not comprise any ribonucleotides. For example, a siNA molecule can be assembled from a single oligonculeotide where the sense and antisense regions of the siNA comprise separate oligonucleotides not having any ribonucleotides (e.g., nucleotides having a 2′-OH group) present in the oligonucleotides. In another example, a siNA molecule can be assembled from a single oligonucleotide where the sense and antisense regions of the siNA are linked or circularized by a nucleotide or non-nucleotide linker as described herein, wherein the oligonucleotide does not have any ribonucleotides (e.g., nucleotides having a 2′-OH group) present in the oligonucleotide. Applicant has surprisingly found that the presence of ribonucleotides (e.g., nucleotides having a 2′-hydroxyl group) within the siNA molecule is not required or essential to support RNAi activity. As such, in one embodiment, all positions within the siNA can include chemically modified nucleotides and/or non-nucleotides such as nucleotides and or non-nucleotides having Formula I, II, III, IV, V, VI, or VII or any combination thereof to the extent that the ability of the siNA molecule to support RNAi activity in a cell is maintained.

[0124] In one embodiment, a siNA molecule of the invention is a single stranded siNA molecule that mediates RNAi activity in a cell or reconstituted in vitro system comprising a single stranded polynucleotide having complementarity to a target nucleic acid sequence. In another embodiment, the single stranded siNA molecule of the invention comprises a 5′-terminal phosphate group. In another embodiment, the single stranded siNA molecule of the invention comprises a 5′-terminal phosphate group and a 3′-terminal phosphate group (e.g., a 2′,3′-cyclic phosphate). In another embodiment, the single stranded siNA molecule of the invention comprises about 19 to about 29 (e.g., about 19, 20, 21, 22, 23, 24, 25, 26, 27, 28, or 29) nucleotides. In yet another embodiment, the single stranded siNA molecule of the invention comprises one or more chemically modified nucleotides or non-nucleotides described herein. For example, all the positions within the siNA molecule can include chemically-modified nucleotides such as nucleotides having any of Formulae I-VII, or any combination thereof to the extent that the ability of the siNA molecule to support RNAi activity in a cell is maintained.

[0125] In one embodiment, a siNA molecule of the invention is a single stranded siNA molecule that mediates RNAi activity in a cell or reconstituted in vitro system comprising a single stranded polynucleotide having complementarity to a target nucleic acid sequence, wherein one or more pyrimidine nucleotides present in the siNA are 2′-deoxy-2′-fluoro pyrimidine nucleotides (e.g., wherein all pyrimidine nucleotides are 2′-deoxy-2′-fluoro pyrimidine nucleotides or alternately a plurality of pyrimidine nucleotides are 2′-deoxy-2′-fluoro pyrimidine nucleotides), and wherein any purine nucleotides present in the antisense region are 2′-O-methyl purine nucleotides (e.g., wherein all purine nucleotides are 2′-O-methyl purine nucleotides or alternately a plurality of purine nucleotides are 2′-O-methyl purine nucleotides), and a terminal cap modification, such as any modification described herein or shown in FIG. 10, that is optionally present at the 3′-end, the 5′-end, or both of the 3′ and 5′-ends of the antisense sequence. The siNA optionally further comprises about 1 to about 4 or more (e.g., about 1, 2, 3, 4 or more) terminal 2′-deoxynucleotides at the 3′-end of the siNA molecule, wherein the terminal nucleotides can further comprise one or more (e.g., 1, 2, 3, 4 or more) phosphorothioate, phosphonoacetate, and/or thiophosphonoacetate internucleotide linkages, and wherein the siNA optionally further comprises a terminal phosphate group, such as a 5′-terminal phosphate group. In any of these embodiments, any purine nucleotides present in the antisense region are alternatively 2′-deoxy purine nucleotides (e.g., wherein all purine nucleotides are 2′-deoxy purine nucleotides or alternately a plurality of purine nucleotides are 2′-deoxy purine nucleotides). Also, in any of these embodiments, any purine nucleotides present in the siNA (i.e., purine nucleotides present in the sense and/or antisense region) can alternatively be locked nucleic acid (LNA) nucleotides (e.g., wherein all purine nucleotides are LNA nucleotides or alternately a plurality of purine nucleotides are LNA nucleotides). Also, in any of these embodiments, any purine nucleotides present in the siNA are alternatively 2′-methoxyethyl purine nucleotides (e.g., wherein all purine nucleotides are 2′-methoxyethyl purine nucleotides or alternately a plurality of purine nucleotides are 2′-methoxyethyl purine nucleotides). In another embodiment, any modified nucleotides present in the single stranded siNA molecules of the invention comprise modified nucleotides having properties or characteristics similar to naturally occurring ribonucleotides. For example, the invention features siNA molecules including modified nucleotides having a Northern conformation (e.g., Northern pseudorotation cycle, see for example Saenger, Principles of Nucleic Acid Structure, Springer-Verlag ed., 1984). As such, chemically modified nucleotides present in the single stranded siNA molecules of the invention are preferably resistant to nuclease degradation while at the same time maintaining the capacity to mediate RNAi.

[0126] In one embodiment, the invention features a method for modulating the expression of a SARS gene within a cell comprising: (a) synthesizing a siNA molecule of the invention, which can be chemically-modified, wherein one of the siNA strands comprises a sequence complementary to RNA of the SARS gene; and (b) introducing the siNA molecule into a cell under conditions suitable to modulate the expression of the SARS gene in the cell.

[0127] In one embodiment, the invention features a method for modulating the expression of a SARS gene within a cell comprising: (a) synthesizing a siNA molecule of the invention, which can be chemically-modified, wherein one of the siNA strands comprises a sequence complementary to RNA of the SARS gene and wherein the sense strand sequence of the siNA comprises a sequence identical or substantially similar to the sequence of the target RNA; and (b) introducing the siNA molecule into a cell under conditions suitable to modulate the expression of the SARS gene in the cell.

[0128] In another embodiment, the invention features a method for modulating the expression of more than one SARS gene within a cell comprising: (a) synthesizing siNA molecules of the invention, which can be chemically-modified, wherein one of the siNA strands comprises a sequence complementary to RNA of the SARS genes; and (b) introducing the siNA molecules into a cell under conditions suitable to modulate the expression of the SARS genes in the cell.

[0129] In another embodiment, the invention features a method for modulating the expression of two or more SARS genes within a cell comprising: (a) synthesizing one or more siNA molecules of the invention, which can be chemically-modified, wherein the siNA strands comprise sequences complementary to RNA of the SARS genes and wherein the sense strand sequences of the siNAs comprise sequences identical or substantially similar to the sequences of the target RNAs; and (b) introducing the siNA molecules into a cell under conditions suitable to modulate the expression of the SARS genes in the cell.

[0130] In another embodiment, the invention features a method for modulating the expression of more than one SARS gene within a cell comprising: (a) synthesizing a siNA molecule of the invention, which can be chemically-modified, wherein one of the siNA strands comprises a sequence complementary to RNA of the SARS gene and wherein the sense strand sequence of the siNA comprises a sequence identical or substantially similar to the sequences of the target RNAs; and (b) introducing the siNA molecule into a cell under conditions suitable to modulate the expression of the SARS genes in the cell.

[0131] In one embodiment, siNA molecules of the invention are used as reagents in ex vivo applications. For example, siNA reagents are introduced into tissue or cells that are transplanted into a subject for therapeutic effect. The cells and/or tissue can be derived from an organism or subject that later receives the explant, or can be derived from another organism or subject prior to transplantation. The siNA molecules can be used to modulate the expression of one or more genes in the cells or tissue, such that the cells or tissue obtain a desired phenotype or are able to perform a function when transplanted in vivo. In one embodiment, certain target cells from a patient are extracted. These extracted cells are contacted with siNAs targeting a specific nucleotide sequence within the cells under conditions suitable for uptake of the siNAs by these cells (e.g. using delivery reagents such as cationic lipids, liposomes and the like or using techniques such as electroporation to facilitate the delivery of siNAs into cells). The cells are then reintroduced back into the same patient or other patients. In one embodiment, the invention features a method of modulating the expression of a SARS gene in a tissue explant comprising: (a) synthesizing a siNA molecule of the invention, which can be chemically-modified, wherein one of the siNA strands comprises a sequence complementary to RNA of the SARS gene; and (b) introducing the siNA molecule into a cell of the tissue explant derived from a particular organism under conditions suitable to modulate the expression of the SARS gene in the tissue explant. In another embodiment, the method further comprises introducing the tissue explant back into the organism the tissue was derived from or into another organism under conditions suitable to modulate the expression of the SARS gene in that organism.

[0132] In one embodiment, the invention features a method of modulating the expression of a SARS gene in a tissue explant comprising: (a) synthesizing a siNA molecule of the invention, which can be chemically-modified, wherein one of the siNA strands comprises a sequence complementary to RNA of the SARS gene and wherein the sense strand sequence of the siNA comprises a sequence identical or substantially similar to the sequence of the target RNA; and (b) introducing the siNA molecule into a cell of the tissue explant derived from a particular organism under conditions suitable to modulate the expression of the SARS gene in the tissue explant. In another embodiment, the method further comprises introducing the tissue explant back into the organism the tissue was derived from or into another organism under conditions suitable to modulate the expression of the SARS gene in that organism.

[0133] In another embodiment, the invention features a method of modulating the expression of more than one SARS gene in a tissue explant comprising: (a) synthesizing siNA molecules of the invention, which can be chemically-modified, wherein one of the siNA strands comprises a sequence complementary to RNA of the SARS genes; and (b) introducing the siNA molecules into a cell of the tissue explant derived from a particular organism under conditions suitable to modulate the expression of the SARS genes in the tissue explant. In another embodiment, the method further comprises introducing the tissue explant back into the organism the tissue was derived from or into another organism under conditions suitable to modulate the expression of the SARS genes in that organism.

[0134] In one embodiment, the invention features a method of modulating the expression of a SARS gene in an organism comprising: (a) synthesizing a siNA molecule of the invention, which can be chemically-modified, wherein one of the siNA strands comprises a sequence complementary to RNA of the SARS gene; and (b) introducing the siNA molecule into the organism under conditions suitable to modulate the expression of the SARS gene in the organism. The level of SARS protein or RNA can be determined as is known in the art.

[0135] In another embodiment, the invention features a method of modulating the expression of more than one SARS gene in an organism comprising: (a) synthesizing siNA molecules of the invention, which can be chemically-modified, wherein one of the siNA strands comprises a sequence complementary to RNA of the SARS genes; and (b) introducing the siNA molecules into the organism under conditions suitable to modulate the expression of the SARS genes in the organism. The level of SARS protein or RNA can be determined as is known in the art.

[0136] In one embodiment, the invention features a method for modulating the expression of a SARS gene within a cell comprising: (a) synthesizing a siNA molecule of the invention, which can be chemically-modified, wherein the siNA comprises a single stranded sequence having complementarity to RNA of the SARS gene; and (b) introducing the siNA molecule into a cell under conditions suitable to modulate the expression of the SARS gene in the cell.

[0137] In another embodiment, the invention features a method for modulating the expression of more than one SARS gene within a cell comprising: (a) synthesizing siNA molecules of the invention, which can be chemically-modified, wherein the siNA comprises a single stranded sequence having complementarity to RNA of the SARS gene; and (b) contacting the cell in vitro or in vivo with the siNA molecule under conditions suitable to modulate the expression of the SARS genes in the cell.

[0138] In one embodiment, the invention features a method of modulating the expression of a SARS gene in a tissue explant comprising: (a) synthesizing a siNA molecule of the invention, which can be chemically-modified, wherein the siNA comprises a single stranded sequence having complementarity to RNA of the SARS gene; and (b) contacting the cell of the tissue explant derived from a particular organism with the siNA molecule under conditions suitable to modulate the expression of the SARS gene in the tissue explant. In another embodiment, the method further comprises introducing the tissue explant back into the organism the tissue was derived from or into another organism under conditions suitable to modulate the expression of the SARS gene in that organism.

[0139] In another embodiment, the invention features a method of modulating the expression of more than one SARS gene in a tissue explant comprising: (a) synthesizing siNA molecules of the invention, which can be chemically-modified, wherein the siNA comprises a single stranded sequence having complementarity to RNA of the SARS gene; and (b) introducing the siNA molecules into a cell of the tissue explant derived from a particular organism under conditions suitable to modulate the expression of the SARS genes in the tissue explant. In another embodiment, the method further comprises introducing the tissue explant back into the organism the tissue was derived from or into another organism under conditions suitable to modulate the expression of the SARS genes in that organism.

[0140] In one embodiment, the invention features a method of modulating the expression of a SARS gene in an organism comprising: (a) synthesizing a siNA molecule of the invention, which can be chemically-modified, wherein the siNA comprises a single stranded sequence having complementarity to RNA of the SARS gene; and (b) introducing the siNA molecule into the organism under conditions suitable to modulate the expression of the SARS gene in the organism.

[0141] In another embodiment, the invention features a method of modulating the expression of more than one SARS gene in an organism comprising: (a) synthesizing siNA molecules of the invention, which can be chemically-modified, wherein the siNA comprises a single stranded sequence having complementarity to RNA of the SARS gene; and (b) introducing the siNA molecules into the organism under conditions suitable to modulate the expression of the SARS genes in the organism.

[0142] In one embodiment, the invention features a method of modulating the expression of a SARS gene in an organism comprising contacting the organism with a siNA molecule of the invention under conditions suitable to modulate the expression of the SARS gene in the organism.

[0143] In another embodiment, the invention features a method of modulating the expression of more than one SARS gene in an organism comprising contacting the organism with one or more siNA molecules of the invention under conditions suitable to modulate the expression of the SARS genes in the organism.

[0144] The siNA molecules of the invention can be designed to down regulate or inhibit target (e.g., SARS) gene expression through RNAi targeting of a variety of RNA molecules. In one embodiment, the siNA molecules of the invention are used to target various RNAs corresponding to a target gene. Non-limiting examples of such RNAs include messenger RNA (mRNA), alternate RNA splice variants of target gene(s), post-transcriptionally modified RNA of target gene(s), pre-mRNA of target gene(s), and/or RNA templates. If alternate splicing produces a family of transcripts that are distinguished by usage of appropriate exons, the instant invention can be used to inhibit gene expression through the appropriate exons to specifically inhibit or to distinguish among the functions of gene family members. For example, a protein that contains an alternatively spliced transmembrane domain can be expressed in both membrane bound and secreted forms. Use of the invention to target the exon containing the transmembrane domain can be used to determine the functional consequences of pharmaceutical targeting of membrane bound as opposed to the secreted form of the protein. Non-limiting examples of applications of the invention relating to targeting these RNA molecules include therapeutic pharmaceutical applications, pharmaceutical discovery applications, molecular diagnostic and gene function applications, and gene mapping, for example using single nucleotide polymorphism mapping with siNA molecules of the invention. Such applications can be implemented using known gene sequences or from partial sequences available from an expressed sequence tag (EST).

[0145] In another embodiment, the siNA molecules of the invention are used to target conserved sequences corresponding to a gene family or gene families such as SARS family genes. As such, siNA molecules targeting multiple SARS targets can provide increased therapeutic effect. In addition, siNA can be used to characterize pathways of gene function in a variety of applications. For example, the present invention can be used to inhibit the activity of target gene(s) in a pathway to determine the function of uncharacterized gene(s) in gene function analysis, mRNA function analysis, or translational analysis. The invention can be used to determine potential target gene pathways involved in various diseases and conditions toward pharmaceutical development. The invention can be used to understand pathways of gene expression involved in, for example, the progression and/or maintenance of SARS virus infection, acute respiratory failure, viral pneumonia, and other indications that can respond to the level of SARS in a cell or tissue.

[0146] In one embodiment, siNA molecule(s) and/or methods of the invention are used to down regulate the expression of gene(s) that encode RNA referred to by Genbank Accession, for example SARS genes encoding RNA sequence(s) referred to herein by Genbank Accession number, for example, Genbank Accession Nos. shown in Table I.

[0147] In one embodiment, the invention features a method comprising: (a) generating a library of siNA constructs having a predetermined complexity; and (b) assaying the siNA constructs of (a) above, under conditions suitable to determine RNAi target sites within the target RNA sequence. In one embodiment, the siNA molecules of (a) have strands of a fixed length, for example, about 23 nucleotides in length. In another embodiment, the siNA molecules of (a) are of differing length, for example having strands of about 19 to about 25 (e.g., about 19, 20, 21, 22, 23, 24, or 25) nucleotides in length. In one embodiment, the assay can comprise a reconstituted in vitro siNA assay as described herein. In another embodiment, the assay can comprise a cell culture system in which target RNA is expressed. In another embodiment, fragments of target RNA are analyzed for detectable levels of cleavage, for example by gel electrophoresis, northern blot analysis, or RNAse protection assays, to determine the most suitable target site(s) within the target RNA sequence. The target RNA sequence can be obtained as is known in the art, for example, by cloning and/or transcription for in vitro systems, and by cellular expression in in vivo systems.

[0148] In one embodiment, the invention features a method comprising: (a) generating a randomized library of siNA constructs having a predetermined complexity, such as of 4^{N}, where N represents the number of base paired nucleotides in each of the siNA construct strands (e.g. for a siNA construct having 21 nucleotide sense and antisense strands with 19 base pairs, the complexity would be 4¹⁹); and (b) assaying the siNA constructs of (a) above, under conditions suitable to determine RNAi target sites within the target SARS RNA sequence. In another embodiment, the siNA molecules of (a) have strands of a fixed length, for example about 23 nucleotides in length. In yet another embodiment, the siNA molecules of (a) are of differing length, for example having strands of about 19 to about 25 (e.g., about 19, 20, 21, 22, 23, 24, or 25) nucleotides in length. In one embodiment, the assay can comprise a reconstituted in vitro siNA assay as described in Example 7 herein. In another embodiment, the assay can comprise a cell culture system in which target RNA is expressed. In another embodiment, fragments of SARS RNA are analyzed for detectable levels of cleavage, for example by gel electrophoresis, northern blot analysis, or RNAse protection assays, to determine the most suitable target site(s) within the target SARS RNA sequence. The target SARS RNA sequence can be obtained as is known in the art, for example, by cloning and/or transcription for in vitro systems, and by cellular expression in in vivo systems.

[0149] In another embodiment, the invention features a method comprising: (a) analyzing the sequence of a RNA target encoded by a target gene; (b) synthesizing one or more sets of siNA molecules having sequence complementary to one or more regions of the RNA of (a); and (c) assaying the siNA molecules of (b) under conditions suitable to determine RNAi targets within the target RNA sequence. In one embodiment, the siNA molecules of (b) have strands of a fixed length, for example about 23 nucleotides in length. In another embodiment, the siNA molecules of (b) are of differing length, for example having strands of about 19 to about 25 (e.g., about 19, 20, 21, 22, 23, 24, or 25) nucleotides in length. In one embodiment, the assay can comprise a reconstituted in vitro siNA assay as described herein. In another embodiment, the assay can comprise a cell culture system in which target RNA is expressed. Fragments of target RNA are analyzed for detectable levels of cleavage, for example by gel electrophoresis, northern blot analysis, or RNAse protection assays, to determine the most suitable target site(s) within the target RNA sequence. The target RNA sequence can be obtained as is known in the art, for example, by cloning and/or transcription for in vitro systems, and by expression in in vivo systems.

[0150] By “target site” is meant a sequence within a target RNA that is “targeted” for cleavage mediated by a siNA construct which contains sequences within its antisense region that are complementary to the target sequence.

[0151] By “detectable level of cleavage” is meant cleavage of target RNA (and formation of cleaved product RNAs) to an extent sufficient to discern cleavage products above the background of RNAs produced by random degradation of the target RNA. Production of cleavage products from 1-5% of the target RNA is sufficient to detect above the background for most methods of detection.

[0152] In one embodiment, the invention features a composition comprising a siNA molecule of the invention, which can be chemically-modified, in a pharmaceutically acceptable carrier or diluent. In another embodiment, the invention features a pharmaceutical composition comprising siNA molecules of the invention, which can be chemically-modified, targeting one or more genes in a pharmaceutically acceptable carrier or diluent. In another embodiment, the invention features a method for diagnosing a disease or condition in a subject comprising administering to the subject a composition of the invention under conditions suitable for the diagnosis of the disease or condition in the subject. In another embodiment, the invention features a method for treating or preventing a disease or condition in a subject, comprising administering to the subject a composition of the invention under conditions suitable for the treatment or prevention of the disease or condition in the subject, alone or in conjunction with one or more other therapeutic compounds. In yet another embodiment, the invention features a method for reducing or preventing tissue rejection in a subject comprising administering to the subject a composition of the invention under conditions suitable for the reduction or prevention of tissue rejection in the subject.

[0153] In another embodiment, the invention features a method for validating a SARS gene target, comprising: (a) synthesizing a siNA molecule of the invention, which can be chemically-modified, wherein one of the siNA strands includes a sequence complementary to RNA of a SARS target gene; (b) introducing the siNA molecule into a cell, tissue, or organism under conditions suitable for modulating expression of the SARS target gene in the cell, tissue, or organism; and (c) determining the function of the gene by assaying for any phenotypic change in the cell, tissue, or organism.

[0154] In another embodiment, the invention features a method for validating a SARS target comprising: (a) synthesizing a siNA molecule of the invention, which can be chemically-modified, wherein one of the siNA strands includes a sequence complementary to RNA of a SARS target gene; (b) introducing the siNA molecule into a biological system under conditions suitable for modulating expression of the SARS target gene in the biological system; and (c) determining the function of the gene by assaying for any phenotypic change in the biological system.

[0155] By “biological system” is meant, material, in a purified or unpurified form, from biological sources, including but not limited to human or animal, wherein the system comprises the components required for RNAi activity. The term “biological system” includes, for example, a cell, tissue, or organism, or extract thereof. The term biological system also includes reconstituted RNAi systems that can be used in an in vitro setting.

[0156] By “phenotypic change” is meant any detectable change to a cell that occurs in response to contact or treatment with a nucleic acid molecule of the invention (e.g., siNA). Such detectable changes include, but are not limited to, changes in shape, size, proliferation, motility, protein expression or RNA expression or other physical or chemical changes as can be assayed by methods known in the art. The detectable change can also include expression of reporter genes/molecules such as Green Florescent Protein (GFP) or various tags that are used to identify an expressed protein or any other cellular component that can be assayed.

[0157] In one embodiment, the invention features a kit containing a siNA molecule of the invention, which can be chemically-modified, that can be used to modulate the expression of a SARS target gene in a biological system, including, for example, in a cell, tissue, or organism. In another embodiment, the invention features a kit containing more than one siNA molecule of the invention, which can be chemically-modified, that can be used to modulate the expression of more than one SARS target gene in a biological system, including, for example, in a cell, tissue, or organism.

[0158] In one embodiment, the invention features a cell containing one or more siNA molecules of the invention, which can be chemically-modified. In another embodiment, the cell containing a siNA molecule of the invention is a mammalian cell. In yet another embodiment, the cell containing a siNA molecule of the invention is a human cell.

[0159] In one embodiment, the synthesis of a siNA molecule of the invention, which can be chemically-modified, comprises: (a) synthesis of two complementary strands of the siNA molecule; (b) annealing the two complementary strands together under conditions suitable to obtain a double-stranded siNA molecule. In another embodiment, synthesis of the two complementary strands of the siNA molecule is by solid phase oligonucleotide synthesis. In yet another embodiment, synthesis of the two complementary strands of the siNA molecule is by solid phase tandem oligonucleotide synthesis.

[0160] In one embodiment, the invention features a method for synthesizing a siNA duplex molecule comprising: (a) synthesizing a first oligonucleotide sequence strand of the siNA molecule, wherein the first oligonucleotide sequence strand comprises a cleavable linker molecule that can be used as a scaffold for the synthesis of the second oligonucleotide sequence strand of the siNA; (b) synthesizing the second oligonucleotide sequence strand of siNA on the scaffold of the first oligonucleotide sequence strand, wherein the second oligonucleotide sequence strand further comprises a chemical moiety than can be used to purify the siNA duplex; (c) cleaving the linker molecule of (a) under conditions suitable for the two siNA oligonucleotide strands to hybridize and form a stable duplex; and (d) purifying the siNA duplex utilizing the chemical moiety of the second oligonucleotide sequence strand. In one embodiment, cleavage of the linker molecule in (c) above takes place during deprotection of the oligonucleotide, for example under hydrolysis conditions using an alkylamine base such as methylamine. In one embodiment, the method of synthesis comprises solid phase synthesis on a solid support such as controlled pore glass (CPG) or polystyrene, wherein the first sequence of (a) is synthesized on a cleavable linker, such as a succinyl linker, using the solid support as a scaffold. The cleavable linker in (a) used as a scaffold for synthesizing the second strand can comprise similar reactivity as the solid support derivatized linker, such that cleavage of the solid support derivatized linker and the cleavable linker of (a) takes place concomitantly. In another embodiment, the chemical moiety of (b) that can be used to isolate the attached oligonucleotide sequence comprises a trityl group, for example a dimethoxytrityl group, which can be employed in a trityl-on synthesis strategy as described herein. In yet another embodiment, the chemical moiety, such as a dimethoxytrityl group, is removed during purification, for example, using acidic conditions.

[0161] In a further embodiment, the method for siNA synthesis is a solution phase synthesis or hybrid phase synthesis wherein both strands of the siNA duplex are synthesized in tandem using a cleavable linker attached to the first sequence which acts a scaffold for synthesis of the second sequence. Cleavage of the linker under conditions suitable for hybridization of the separate siNA sequence strands results in formation of the double-stranded siNA molecule.

[0162] In another embodiment, the invention features a method for synthesizing a siNA duplex molecule comprising: (a) synthesizing one oligonucleotide sequence strand of the siNA molecule, wherein the sequence comprises a cleavable linker molecule that can be used as a scaffold for the synthesis of another oligonucleotide sequence; (b) synthesizing a second oligonucleotide sequence having complementarity to the first sequence strand on the scaffold of (a), wherein the second sequence comprises the other strand of the double-stranded siNA molecule and wherein the second sequence further comprises a chemical moiety than can be used to isolate the attached oligonucleotide sequence; (c) purifying the product of (b) utilizing the chemical moiety of the second oligonucleotide sequence strand under conditions suitable for isolating the full-length sequence comprising both siNA oligonucleotide strands connected by the cleavable linker and under conditions suitable for the two siNA oligonucleotide strands to hybridize and form a stable duplex. In one embodiment, cleavage of the linker molecule in (c) above takes place during deprotection of the oligonucleotide, for example under hydrolysis conditions. In another embodiment, cleavage of the linker molecule in (c) above takes place after deprotection of the oligonucleotide. In another embodiment, the method of synthesis comprises solid phase synthesis on a solid support such as controlled pore glass (CPG) or polystyrene, wherein the first sequence of (a) is synthesized on a cleavable linker, such as a succinyl linker, using the solid support as a scaffold. The cleavable linker in (a) used as a scaffold for synthesizing the second strand can comprise similar reactivity or differing reactivity as the solid support derivatized linker, such that cleavage of the solid support derivatized linker and the cleavable linker of (a) takes place either concomitantly or sequentially. In one embodiment, the chemical moiety of (b) that can be used to isolate the attached oligonucleotide sequence comprises a trityl group, for example a dimethoxytrityl group.

[0163] In another embodiment, the invention features a method for making a double-stranded siNA molecule in a single synthetic process comprising: (a) synthesizing an oligonucleotide having a first and a second sequence, wherein the first sequence is complementary to the second sequence, and the first oligonucleotide sequence is linked to the second sequence via a cleavable linker, and wherein a terminal 5′-protecting group, for example, a 5′-O-dimethoxytrityl group (5′-O-DMT) remains on the oligonucleotide having the second sequence; (b) deprotecting the oligonucleotide whereby the deprotection results in the cleavage of the linker joining the two oligonucleotide sequences; and (c) purifying the product of (b) under conditions suitable for isolating the double-stranded siNA molecule, for example using a trityl-on synthesis strategy as described herein.

[0164] In another embodiment, the method of synthesis of siNA molecules of the invention comprises the teachings of Scaringe et al., U.S. Pat. Nos. 5,889,136; 6,008,400; and 6,111,086, incorporated by reference herein in their entirety.

[0165] In one embodiment, the invention features siNA constructs that mediate RNAi against SARS, wherein the siNA construct comprises one or more chemical modifications, for example, one or more chemical modifications having any of Formulae I-VII or any combination thereof that increases the nuclease resistance of the siNA construct.

[0166] In another embodiment, the invention features a method for generating siNA molecules with increased nuclease resistance comprising (a) introducing nucleotides having any of Formula I-VII or any combination thereof into a siNA molecule, and (b) assaying the siNA molecule of step (a) under conditions suitable for isolating siNA molecules having increased nuclease resistance.

[0167] In one embodiment, the invention features siNA constructs that mediate RNAi against SARS, wherein the siNA construct comprises one or more chemical modifications described herein that modulates the binding affinity between the sense and antisense strands of the siNA construct.

[0168] In another embodiment, the invention features a method for generating siNA molecules with increased binding affinity between the sense and antisense strands of the siNA molecule comprising (a) introducing nucleotides having any of Formula I-VII or any combination thereof into a siNA molecule, and (b) assaying the siNA molecule of step (a) under conditions suitable for isolating siNA molecules having increased binding affinity between the sense and antisense strands of the siNA molecule.

[0169] In one embodiment, the invention features siNA constructs that mediate RNAi against SARS, wherein the siNA construct comprises one or more chemical modifications described herein that modulates the binding affinity between the antisense strand of the siNA construct and a complementary target RNA sequence within a cell.

[0170] In one embodiment, the invention features siNA constructs that mediate RNAi against SARS, wherein the siNA construct comprises one or more chemical modifications described herein that modulates the binding affinity between the antisense strand of the siNA construct and a complementary target DNA sequence within a cell.

[0171] In another embodiment, the invention features a method for generating siNA molecules with increased binding affinity between the antisense strand of the siNA molecule and a complementary target RNA sequence comprising (a) introducing nucleotides having any of Formula I-VII or any combination thereof into a siNA molecule, and (b) assaying the siNA molecule of step (a) under conditions suitable for isolating siNA molecules having increased binding affinity between the antisense strand of the siNA molecule and a complementary target RNA sequence.

[0172] In another embodiment, the invention features a method for generating siNA molecules with increased binding affinity between the antisense strand of the siNA molecule and a complementary target DNA sequence comprising (a) introducing nucleotides having any of Formula I-VII or any combination thereof into a siNA molecule, and (b) assaying the siNA molecule of step (a) under conditions suitable for isolating siNA molecules having increased binding affinity between the antisense strand of the siNA molecule and a complementary target DNA sequence.

[0173] In one embodiment, the invention features siNA constructs that mediate RNAi against SARS, wherein the siNA construct comprises one or more chemical modifications described herein that modulate the polymerase activity of a cellular polymerase capable of generating additional endogenous siNA molecules having sequence homology to the chemically-modified siNA construct.

[0174] In another embodiment, the invention features a method for generating siNA molecules capable of mediating increased polymerase activity of a cellular polymerase capable of generating additional endogenous siNA molecules having sequence homology to a chemically-modified siNA molecule comprising (a) introducing nucleotides having any of Formula I-VII or any combination thereof into a siNA molecule, and (b) assaying the siNA molecule of step (a) under conditions suitable for isolating siNA molecules capable of mediating increased polymerase activity of a cellular polymerase capable of generating additional endogenous siNA molecules having sequence homology to the chemically-modified siNA molecule.

[0175] In one embodiment, the invention features chemically-modified siNA constructs that mediate RNAi against SARS in a cell, wherein the chemical modifications do not significantly effect the interaction of siNA with a target RNA molecule, DNA molecule and/or proteins or other factors that are essential for RNAi in a manner that would decrease the efficacy of RNAi mediated by such siNA constructs.

[0176] In another embodiment, the invention features a method for generating siNA molecules with improved RNAi activity against SARS comprising (a) introducing nucleotides having any of Formula I-VII or any combination thereof into a siNA molecule, and (b) assaying the siNA molecule of step (a) under conditions suitable for isolating siNA molecules having improved RNAi activity.

[0177] In yet another embodiment, the invention features a method for generating siNA molecules with improved RNAi activity against SARS target RNA comprising (a) introducing nucleotides having any of Formula I-VII or any combination thereof into a siNA molecule, and (b) assaying the siNA molecule of step (a) under conditions suitable for isolating siNA molecules having improved RNAi activity against the target RNA.

[0178] In yet another embodiment, the invention features a method for generating siNA molecules with improved RNAi activity against SARS target DNA comprising (a) introducing nucleotides having any of Formula I-VII or any combination thereof into a siNA molecule, and (b) assaying the siNA molecule of step (a) under conditions suitable for isolating siNA molecules having improved RNAi activity against the target DNA.

[0179] In one embodiment, the invention features siNA constructs that mediate RNAi against SARS, wherein the siNA construct comprises one or more chemical modifications described herein that modulates the cellular uptake of the siNA construct.

[0180] In another embodiment, the invention features a method for generating siNA molecules against SARS with improved cellular uptake comprising (a) introducing nucleotides having any of Formula I-VII or any combination thereof into a siNA molecule, and (b) assaying the siNA molecule of step (a) under conditions suitable for isolating siNA molecules having improved cellular uptake.

[0181] In one embodiment, the invention features siNA constructs that mediate RNAi against SARS, wherein the siNA construct comprises one or more chemical modifications described herein that increases the bioavailability of the siNA construct, for example, by attaching polymeric conjugates such as polyethyleneglycol or equivalent conjugates that improve the pharmacokinetics of the siNA construct, or by attaching conjugates that target specific tissue types or cell types in vivo. Non-limiting examples of such conjugates are described in Vargeese et al., U.S. Ser. No. 10/201,394 incorporated by reference herein.

[0182] In one embodiment, the invention features a method for generating siNA molecules of the invention with improved bioavailability, comprising (a) introducing a conjugate into the structure of a siNA molecule, and (b) assaying the siNA molecule of step (a) under conditions suitable for isolating siNA molecules having improved bioavailability. Such conjugates can include ligands for cellular receptors, such as peptides derived from naturally occurring protein ligands; protein localization sequences, including cellular ZIP code sequences; antibodies; nucleic acid aptamers; vitamins and other co-factors, such as folate and N-acetylgalactosamine; polymers, such as polyethyleneglycol (PEG); phospholipids; cholesterol; polyamines, such as spermine or spermidine; and others.

[0183] In one embodiment, the invention features a double stranded short interfering nucleic acid (siNA) molecule that comprises a first nucleotide sequence complementary to a target RNA sequence or a portion thereof, and a second sequence having complementarity to said first sequence, wherein said second sequence is chemically modified in a manner that it can no longer act as a guide sequence for efficiently mediating RNA interference and/or be recognized by cellular proteins that facilitate RNAi.

[0184] In one embodiment, the invention features a double stranded short interfering nucleic acid (siNA) molecule that comprises a first nucleotide sequence complementary to a target RNA sequence or a portion thereof, and a second sequence having complementarity to said first sequence, wherein the second sequence is designed or modified in a manner that prevents its entry into the RNAi pathway as a guide sequence or as a sequence that is complementary to a target nucleic acid (e.g., RNA) sequence. Such design or modifications are expected to enhance the activity of siNA and/or improve the specificity of siNA molecules of the invention. These modifications are also expected to minimize any off-target effects and/or associated toxicity.

[0185] In one embodiment, the invention features a double stranded short interfering nucleic acid (siNA) molecule that comprises a first nucleotide sequence complementary to a target RNA sequence or a portion thereof, and a second sequence having complementarity to said first sequence, wherein said second sequence is incapable of acting as a guide sequence for mediating RNA interference.

[0186] In one embodiment, the invention features a double stranded short interfering nucleic acid (siNA) molecule that comprises a first nucleotide sequence complementary to a target RNA sequence or a portion thereof, and a second sequence having complementarity to said first sequence, wherein said second sequence does not have a terminal 5′-hydroxyl (5′-OH) or 5′-phosphate group.

[0187] In one embodiment, the invention features a double stranded short interfering nucleic acid (siNA) molecule that comprises a first nucleotide sequence complementary to a target RNA sequence or a portion thereof, and a second sequence having complementarity to said first sequence, wherein said second sequence comprises a terminal cap moiety at the 5′-end of said second sequence. In one embodiment, the terminal cap moiety comprises an inverted abasic, inverted deoxy abasic, inverted nucleotide moiety, a group shown in FIG. 10, an alkyl or cycloalkyl group, a heterocycle, or any other group that prevents RNAi activity in which the second sequence serves as a guide sequence or template for RNAi.

[0188] In one embodiment, the invention features a double stranded short interfering nucleic acid (siNA) molecule that comprises a first nucleotide sequence complementary to a target RNA sequence or a portion thereof, and a second sequence having complementarity to said first sequence, wherein said second sequence comprises a terminal cap moiety at the 5′-end and 3′-end of said second sequence. In one embodiment, each terminal cap moiety individually comprises an inverted abasic, inverted deoxy abasic, inverted nucleotide moiety, a group shown in FIG. 10, an alkyl or cycloalkyl group, a heterocycle, or any other group that prevents RNAi activity in which the second sequence serves as a guide sequence or template for RNAi.

[0189] In one embodiment, the invention features a method for generating siNA molecules of the invention with improved specificity for down regulating or inhibiting the expression of a target nucleic acid (e.g., a DNA or RNA such as a gene or its corresponding RNA), comprising (a) introducing one or more chemical modifications into the structure of a siNA molecule, and (b) assaying the siNA molecule of step (a) under conditions suitable for isolating siNA molecules having improved specificity. In another embodiment, the chemical modification used to improve specificity comprises terminal cap modifications at the 5′-end, 3′-end, or both 5′ and 3′-ends of the siNA molecule. The terminal cap modifications can comprise, for example, structures shown in FIG. 10 (e.g. inverted deoxyabasic moieties) or any other chemical modification that renders a portion of the siNA molecule (e.g. the sense strand) incapable of mediating RNA interference against an off target nucleic acid sequence. In a non-limiting example, a siNA molecule is designed such that only the antisense sequence of the siNA molecule can serve as a guide sequence for RISC mediated degradation of a corresponding target RNA sequence. This can be accomplished by rendering the sense sequence of the siNA inactive by introducing chemical modifications to the sense strand that preclude recognition of the sense strand as a guide sequence by RNAi machinery. In one embodiment, such chemical modifications comprise any chemical group at the 5′-end of the sense strand of the siNA, or any other group that serves to render the sense strand inactive as a guide sequence for mediating RNA interference. These modifications, for example, can result in a molecule where the 5′-end of the sense strand no longer has a free 5′-hydroxyl (5′-OH) or a free 5′-phosphate group (e.g., phosphate, diphosphate, triphosphate, cyclic phosphate etc.). Non-limiting examples of such siNA constructs are described herein, such as “Stab 9/10”, “Stab ⅞”, “Stab 7/19” and “Stab 17/22” chemistries and variants thereof (see Table IV) wherein the 5′-end and 3′-end of the sense strand of the siNA do not comprise a hydroxyl group or phosphate group.

[0190] In one embodiment, the invention features a method for generating siNA molecules of the invention with improved specificity for down regulating or inhibiting the expression of a target nucleic acid (e.g., a DNA or RNA such as a gene or its corresponding RNA), comprising introducing one or more chemical modifications into the structure of a siNA molecule that prevent a strand or portion of the siNA molecule from acting as a template or guide sequence for RNAi activity. In one embodiment, the inactive strand or sense region of the siNA molecule is the sense strand or sense region of the siNA molecule, i.e. the strand or region of the siNA that does not have complementarity to the target nucleic acid sequence. In one embodiment, such chemical modifications comprise any chemical group at the 5′-end of the sense strand or region of the siNA that does not comprise a 5′-hydroxyl (5′-OH) or 5′-phosphate group, or any other group that serves to render the sense strand or sense region inactive as a guide sequence for mediating RNA interference. Non-limiting examples of such siNA constructs are described herein, such as “Stab 9/10”, “Stab ⅞”, “Stab 7/19” and “Stab 17/22” chemistries and variants thereof (see Table IV) wherein the 5′-end and 3′-end of the sense strand of the siNA do not comprise a hydroxyl group or phosphate group.

[0191] In one embodiment, the invention features a method for screening siNA molecules that are active in mediating RNA interference against a target nucleic acid sequence comprising (a) generating a plurality of unmodified siNA molecules, (b) screening the siNA molecules of step (a) under conditions suitable for isolating siNA molecules that are active in mediating RNA interference against the target nucleic acid sequence, and (c) introducing chemical modifications (e.g. chemical modifications as described herein or as otherwise known in the art) into the active siNA molecules of (b). In one embodiment, the method further comprises re-screening the chemically modified siNA molecules of step (c) under conditions suitable for isolating chemically modified siNA molecules that are active in mediating RNA interference against the target nucleic acid sequence.

[0192] In one embodiment, the invention features a method for screening chemically modified siNA molecules that are active in mediating RNA interference against a target nucleic acid sequence comprising (a) generating a plurality of chemically modified siNA molecules (e.g. siNA molecules as described herein or as otherwise known in the art), and (b) screening the siNA molecules of step (a) under conditions suitable for isolating chemically modified siNA molecules that are active in mediating RNA interference against the target nucleic acid sequence.

[0193] The term “ligand” refers to any compound or molecule, such as a drug, peptide, hormone, or neurotransmitter, that is capable of interacting with another compound, such as a receptor, either directly or indirectly. The receptor that interacts with a ligand can be present on the surface of a cell or can alternately be an intercellular receptor. Interaction of the ligand with the receptor can result in a biochemical reaction, or can simply be a physical interaction or association.

[0194] In another embodiment, the invention features a method for generating siNA molecules of the invention with improved bioavailability comprising (a) introducing an excipient formulation to a siNA molecule, and (b) assaying the siNA molecule of step (a) under conditions suitable for isolating siNA molecules having improved bioavailability. Such excipients include polymers such as cyclodextrins, lipids, cationic lipids, polyamines, phospholipids, nanoparticles, receptors, ligands, and others.

[0195] In another embodiment, the invention features a method for generating siNA molecules of the invention with improved bioavailability comprising (a) introducing nucleotides having any of Formulae I-VII or any combination thereof into a siNA molecule, and (b) assaying the siNA molecule of step (a) under conditions suitable for isolating siNA molecules having improved bioavailability.

[0196] In another embodiment, polyethylene glycol (PEG) can be covalently attached to siNA compounds of the present invention. The attached PEG can be any molecular weight, preferably from about 2,000 to about 50,000 daltons (Da).

[0197] The present invention can be used alone or as a component of a kit having at least one of the reagents necessary to carry out the in vitro or in vivo introduction of RNA to test samples and/or subjects. For example, preferred components of the kit include a siNA molecule of the invention and a vehicle that promotes introduction of the siNA into cells of interest as described herein (e.g., using lipids and other methods of transfection known in the art, see for example Beigelman et al, U.S. Pat. No. 6,395,713). The kit can be used for target validation, such as in determining gene function and/or activity, or in drug optimization, and in drug discovery (see for example Usman et al., U.S. Ser. No. 60/402,996). Such a kit can also include instructions to allow a user of the kit to practice the invention.

[0198] The term “short interfering nucleic acid”, “siNA”, “short interfering RNA”, “siRNA”, “short interfering nucleic acid molecule”, “short interfering oligonucleotide molecule”, or “chemically-modified short interfering nucleic acid molecule” as used herein refers to any nucleic acid molecule capable of inhibiting or down regulating gene expression or viral replication, for example by mediating RNA interference “RNAi” or gene silencing in a sequence-specific manner; see for example Zamore et al., 2000, Cell, 101, 25-33; Bass, 2001, Nature, 411, 428-429; Elbashir et al., 2001, Nature, 411, 494-498; and Kreutzer et al., International PCT Publication No. WO 00/44895; Zernicka-Goetz et al., International PCT Publication No. WO 01/36646; Fire, International PCT Publication No. WO 99/32619; Plaetinck et al., International PCT Publication No. WO 00/01846; Mello and Fire, International PCT Publication No. WO 01/29058; Deschamps-Depaillette, International PCT Publication No. WO 99/07409; and Li et al., International PCT Publication No. WO 00/44914; Allshire, 2002, Science, 297, 1818-1819; Volpe et al., 2002, Science, 297, 1833-1837; Jenuwein, 2002, Science, 297, 2215-2218; and Hall et al., 2002, Science, 297, 2232-2237; Hutvagner and Zamore, 2002, Science, 297, 2056-60; McManus et al., 2002, RNA, 8, 842-850; Reinhart et al., 2002, Gene & Dev., 16, 1616-1626; and Reinhart & Bartel, 2002, Science, 297, 1831). Non limiting examples of siNA molecules of the invention are shown in FIGS. 4-6, and Tables II and III herein. For example the siNA can be a double-stranded polynucleotide molecule comprising self-complementary sense and antisense regions, wherein the antisense region comprises nucleotide sequence that is complementary to nucleotide sequence in a target nucleic acid molecule or a portion thereof and the sense region having nucleotide sequence corresponding to the target nucleic acid sequence or a portion thereof. The siNA can be assembled from two separate oligonucleotides, where one strand is the sense strand and the other is the antisense strand, wherein the antisense and sense strands are self-complementary (i.e. each strand comprises nucleotide sequence that is complementary to nucleotide sequence in the other strand; such as where the antisense strand and sense strand form a duplex or double stranded structure, for example wherein the double stranded region is about 19 base pairs); the antisense strand comprises nucleotide sequence that is complementary to nucleotide sequence in a target nucleic acid molecule or a portion thereof and the sense strand comprises nucleotide sequence corresponding to the target nucleic acid sequence or a portion thereof. Alternatively, the siNA is assembled from a single oligonucleotide, where the self-complementary sense and antisense regions of the siNA are linked by means of a nucleic acid based or non-nucleic acid-based linker(s). The siNA can be a polynucleotide with a duplex, asymmetric duplex, hairpin or asymmetric hairpin secondary structure, having self-complementary sense and antisense regions, wherein the antisense region comprises nucleotide sequence that is complementary to nucleotide sequence in a separate target nucleic acid molecule or a portion thereof and the sense region having nucleotide sequence corresponding to the target nucleic acid sequence or a portion thereof. The siNA can be a circular single-stranded polynucleotide having two or more loop structures and a stem comprising self-complementary sense and antisense regions, wherein the antisense region comprises nucleotide sequence that is complementary to nucleotide sequence in a target nucleic acid molecule or a portion thereof and the sense region having nucleotide sequence corresponding to the target nucleic acid sequence or a portion thereof, and wherein the circular polynucleotide can be processed either in vivo or in vitro to generate an active siNA molecule capable of mediating RNAi. The siNA can also comprise a single stranded polynucleotide having nucleotide sequence complementary to nucleotide sequence in a target nucleic acid molecule or a portion thereof (for example, where such siNA molecule does not require the presence within the siNA molecule of nucleotide sequence corresponding to the target nucleic acid sequence or a portion thereof), wherein the single stranded polynucleotide can further comprise a terminal phosphate group, such as a 5′-phosphate (see for example Martinez et al., 2002, Cell., 110, 563-574 and Schwarz et al., 2002, Molecular Cell, 10, 537-568), or 5′,3′-diphosphate. In certain embodiments, the siNA molecule of the invention comprises separate sense and antisense sequences or regions, wherein the sense and antisense regions are covalently linked by nucleotide or non-nucleotide linkers molecules as is known in the art, or are alternately non-covalently linked by ionic interactions, hydrogen bonding, van der waals interactions, hydrophobic intercations, and/or stacking interactions. In certain embodiments, the siNA molecules of the invention comprise nucleotide sequence that is complementary to nucleotide sequence of a target gene. In another embodiment, the siNA molecule of the invention interacts with nucleotide sequence of a target gene in a manner that causes inhibition of expression of the target gene. As used herein, siNA molecules need not be limited to those molecules containing only RNA, but further encompasses chemically-modified nucleotides and non-nucleotides. In certain embodiments, the short interfering nucleic acid molecules of the invention lack 2′-hydroxy (2′-OH) containing nucleotides. Applicant describes in certain embodiments short interfering nucleic acids that do not require the presence of nucleotides having a 2′-hydroxy group for mediating RNAi and as such, short interfering nucleic acid molecules of the invention optionally do not include any ribonucleotides (e.g., nucleotides having a 2′-OH group). Such siNA molecules that do not require the presence of ribonucleotides within the siNA molecule to support RNAi can however have an attached linker or linkers or other attached or associated groups, moieties, or chains containing one or more nucleotides with 2′-OH groups. Optionally, siNA molecules can comprise ribonucleotides at about 5, 10, 20, 30, 40, or 50% of the nucleotide positions. The modified short interfering nucleic acid molecules of the invention can also be referred to as short interfering modified oligonucleotides “siMON.”As used herein, the term siNA is meant to be equivalent to other terms used to describe nucleic acid molecules that are capable of mediating sequence specific RNAi, for example short interfering RNA (siRNA), double-stranded RNA (dsRNA), micro-RNA (miRNA), short hairpin RNA (shRNA), short interfering oligonucleotide, short interfering nucleic acid, short interfering modified oligonucleotide, chemically-modified siRNA, post-transcriptional gene silencing RNA (ptgsRNA), and others. In addition, as used herein, the term RNAi is meant to be equivalent to other terms used to describe sequence specific RNA interference, such as post transcriptional gene silencing, translational inhibition, or epigenetics. For example, siNA molecules of the invention can be used to epigenetically silence genes at both the post-transcriptional level or the pre-transcriptional level. In a non-limiting example, epigenetic regulation of gene expression by siNA molecules of the invention can result from siNA mediated modification of chromatin structure to alter gene expression (see, for example, Verdel et al., 2004, Science, 303, 672-676; Pal-Bhadra et al., 2004, Science, 303, 669-672; Allshire, 2002, Science, 297, 1818-1819; Volpe et al., 2002, Science, 297, 1833-1837; Jenuwein, 2002, Science, 297, 2215-2218; and Hall et at., 2002, Science, 297, 2232-2237).

[0199] In one embodiment, a siNA molecule of the invention is a duplex forming oligonucleotide “DFO”, (see for example FIGS. 14-15 and Vaish et al., U.S. Ser. No. 10/727,780 filed Dec. 3, 2003).

[0200] In one embodiment, a siNA molecule of the invention is a multifunctional siNA, (see for example FIGS. 16-22 and Jadhav et at, U.S. Ser. No. 60/543,480, filed Feb. 10, 2004). The multifunctional siNA of the invention can comprise sequence targeting, for example, two regions of SARS RNA (see for example target sequences in Tables II and III) or alternately, SARS RNA and cellular RNA involved in SARS virus infection or replication. In another embodiment, a multifunctional siNA of the invention can comprise sequence targeting for example both viral genes encoding RNAi inhibitory factors and viral genes encoding viral structural proteins.

[0201] By “asymmetric hairpin” as used herein is meant a linear siNA molecule comprising an antisense region, a loop portion that can comprise nucleotides or non-nucleotides, and a sense region that comprises fewer nucleotides than the antisense region to the extent that the sense region has enough complementary nucleotides to base pair with the antisense region and form a duplex with loop. For example, an asymmetric hairpin siNA molecule of the invention can comprise an antisense region having length sufficient to mediate RNAi in a cell or in vitro system (e.g. about 19 to about 22 (e.g., about 19, 20, 21, or 22) nucleotides) and a loop region comprising about 4 to about 8 (e.g., about 4, 5, 6, 7, or 8) nucleotides, and a sense region having about 3 to about 18 (e.g., about 3, 4, 5, 6, 7, 8, 9, 10, 11, 12, 13, 14, 15, 16, 17, or 18) nucleotides that are complementary to the antisense region. The asymmetric hairpin siNA molecule can also comprise a 5′-terminal phosphate group that can be chemically modified. The loop portion of the asymmetric hairpin siNA molecule can comprise nucleotides, non-nucleotides, linker molecules, or conjugate molecules as described herein.

[0202] By “asymmetric duplex” as used herein is meant a siNA molecule having two separate strands comprising a sense region and an antisense region, wherein the sense region comprises fewer nucleotides than the antisense region to the extent that the sense region has enough complementary nucleotides to base pair with the antisense region and form a duplex. For example, an asymmetric duplex siNA molecule of the invention can comprise an antisense region having length sufficient to mediate RNAi in a cell or in vitro system (e.g. about 19 to about 22 (e.g. about 19, 20, 21, or 22) nucleotides) and a sense region having about 3 to about 18 (e.g., about 3, 4, 5, 6, 7, 8, 9, 10, 11, 12, 13, 14, 15, 16, 17, or 18) nucleotides that are complementary to the antisense region. By “modulate” is meant that the expression of the gene, or level of RNA molecule or equivalent RNA molecules encoding one or more proteins or protein subunits, or activity of one or more proteins or protein subunits is up regulated or down regulated, such that expression, level, or activity is greater than or less than that observed in the absence of the modulator. For example, the term “modulate” can mean “inhibit,” but the use of the word “modulate” is not limited to this definition.

[0203] By “inhibit”, “down-regulate”, or “reduce”, it is meant that the expression of the gene, or level of RNA molecules or equivalent RNA molecules encoding one or more proteins or protein subunits, or activity of one or more proteins or protein subunits, is reduced below that observed in the absence of the nucleic acid molecules (e.g., siNA) of the invention. In one embodiment, inhibition, down-regulation or reduction with an siNA molecule is below that level observed in the presence of an inactive or attenuated molecule. In another embodiment, inhibition, down-regulation, or reduction with siNA molecules is below that level observed in the presence of, for example, an siNA molecule with scrambled sequence or with mismatches. In another embodiment, inhibition, down-regulation, or reduction of gene expression with a nucleic acid molecule of the instant invention is greater in the presence of the nucleic acid molecule than in its absence.

[0204] By “gene”, or “target gene”, is meant, a nucleic acid that encodes an RNA, for example, nucleic acid sequences including, but not limited to, structural genes encoding a polypeptide. A gene or target gene can also encode a functional RNA (fRNA) or non-coding RNA (ncRNA), such as small temporal RNA (stRNA), micro RNA (miRNA), small nuclear RNA (snRNA), short interfering RNA (siRNA), small nucleolar RNA (snRNA), ribosomal RNA (rRNA), transfer RNA (tRNA) and precursor RNAs thereof. Such non-coding RNAs can serve as target nucleic acid molecules for siNA mediated RNA interference in modulating the activity of fRNA or ncRNA involved in functional or regulatory cellular processes. Abberant fRNA or ncRNA activity leading to disease can therefore be modulated by siNA molecules of the invention. siNA molecules targeting fRNA and ncRNA can also be used to manipulate or alter the genotype or phenotype of an organism or cell, by intervening in cellular processes such as genetic imprinting, transcription, translation, or nucleic acid processing (e.g., transamination, methylation etc.). The target gene can be a gene derived from a cell, an endogenous gene, a transgene, or exogenous genes such as genes of a pathogen, for example a virus, which is present in the cell after infection thereof. The cell containing the target gene can be derived from or contained in any organism, for example a plant, animal, protozoan, virus, bacterium, or fungus. Non-limiting examples of plants include monocots, dicots, or gymnosperms. Non-limiting examples of animals include vertebrates or invertebrates. Non-limiting examples of fungi include molds or yeasts.

[0205] By “SARS” or “SARS virus” as used herein is meant the SARS virus or any protein, peptide, or polypeptide, having SARS virus activity or encoded by the SARS genome. The term “SARS” also includes nucleic acid molecules encoding RNA or protein(s) associated with the development and/or maintenance of SARS virus infection, such as nucleic acid molecules which encode SARS RNA or polypeptides (such as polynucleotides having Genbank Accession numbers shown in Table I), including polypeptides of different strains of SARS, mutant SARS genes, and splice variants of SARS genes, as well as genes involved in SARS pathways of gene expression and/or SARS activity. Also, the term “SARS” is meant to encompass SARS viral gene products and genes that modulate cellular targets for SARS virus infection, such as those described herein.

[0206] By “SARS protein” or “SARS virus protein” is meant, protein, peptide, or polypeptide, having SARS virus activity or encoded by the SARS genome or alternately, cellular proteins involved in SARS virus infection and/or replication.

[0207] By “homologous sequence” is meant, a nucleotide sequence that is shared by one or more polynucleotide sequences, such as genes, gene transcripts and/or non-coding polynucleotides. For example, a homologous sequence can be a nucleotide sequence that is shared by two or more genes encoding related but different proteins, such as different members of a gene family, different protein epitopes, different protein isoforms or completely divergent genes, such as a cytokine and its corresponding receptors. A homologous sequence can be a nucleotide sequence that is shared by two or more non-coding polynucleotides, such as noncoding DNA or RNA, regulatory sequences, introns, and sites of transcriptional control or regulation. Homologous sequences can also include conserved sequence regions shared by more than one polynucleotide sequence. Homology does not need to be perfect homology (e.g., 100%), as partially homologous sequences are also contemplated by the instant invention (e.g., 99%, 98%, 97%, 96%, 95%, 94%, 93%, 92%, 91%, 90%, 89%, 88%, 87%, 86%, 85%, 84%, 83%, 82%, 81%, 80% etc.).

[0208] By “conserved sequence region” is meant, a nucleotide sequence of one or more regions in a polynucleotide does not vary significantly between generations or from one biological system or organism to another biological system or organism. The polynucleotide can include both coding and non-coding DNA and RNA.

[0209] By “sense region” is meant a nucleotide sequence of a siNA molecule having complementarity to an antisense region of the siNA molecule. In addition, the sense region of a siNA molecule can comprise a nucleic acid sequence having homology with a target nucleic acid sequence.

[0210] By “antisense region” is meant a nucleotide sequence of a siNA molecule having complementarity to a target nucleic acid sequence. In addition, the antisense region of a siNA molecule can optionally comprise a nucleic acid sequence having complementarity to a sense region of the siNA molecule.

[0211] By “target nucleic acid” is meant any nucleic acid sequence whose expression or activity is to be modulated. The target nucleic acid can be DNA or RNA.

[0212] By “complementarity” is meant that a nucleic acid can form hydrogen bond(s) with another nucleic acid sequence by either traditional Watson-Crick or other non-traditional types. In reference to the nucleic molecules of the present invention, the binding free energy for a nucleic acid molecule with its complementary sequence is sufficient to allow the relevant function of the nucleic acid to proceed, e.g., RNAi activity.

[0213] Determination of binding free energies for nucleic acid molecules is well known in the art (see, e.g., Turner et al., 1987, CSH Symp. Quant. Biol. LII pp. 123-133; Frier et al., 1986, Proc. Nat. Acad. Sci. USA 83:9373-9377; Turner et al., 1987, J. Am. Chem. Soc. 109:3783-3785). A percent complementarity indicates the percentage of contiguous residues in a nucleic acid molecule that can form hydrogen bonds (e.g., Watson-Crick base pairing) with a second nucleic acid sequence (e.g., 5, 6, 7, 8, 9, or 10 nucleotides out of a total of 10 nucleotides in the first oligonucleotide being based paired to a second nucleic acid sequence having 10 nucleotides represents 50%, 60%, 70%, 80%, 90%, and 100% complementary respectively). “Perfectly complementary” means that all the contiguous residues of a nucleic acid sequence will hydrogen bond with the same number of contiguous residues in a second nucleic acid sequence.

[0214] The siNA molecules of the invention represent a novel therapeutic approach to treat various diseases and conditions, including SARS virus infection, acute respiratory failure, viral pneumonia, and any other indications that can respond to the level of SARS in a cell or tissue. The reduction of SARS expression and thus reduction in the level of the respective protein relieves, to some extent, the symptoms of the disease or condition.

[0215] In one embodiment of the present invention, each sequence of a siNA molecule of the invention is independently about 18 to about 24 nucleotides in length, in specific embodiments about 18, 19, 20, 21, 22, 23, or 24 nucleotides in length. In another embodiment, the siNA duplexes of the invention independently comprise about 17 to about 23 base pairs (e.g., about 17, 18, 19, 20, 21, 22 or 23). In yet another embodiment, siNA molecules of the invention comprising hairpin or circular structures are about 35 to about 55 (e.g., about 35, 40, 45, 50 or 55) nucleotides in length, or about 38 to about 44 (e.g., 38, 39, 40, 41, 42, 43 or 44) nucleotides in length and comprising about 16 to about 22 (e.g., about 16, 17, 18, 19, 20, 21 or 22) base pairs. Exemplary siNA molecules of the invention are shown in Table II. Exemplary synthetic siNA molecules of the invention are shown in Table III and/or FIGS. 4-5.

[0216] As used herein “cell” is used in its usual biological sense, and does not refer to an entire multicellular organism, e.g., specifically does not refer to a human. The cell can be present in an organism, e.g., birds, plants and mammals such as humans, cows, sheep, apes, monkeys, swine, dogs, and cats. The cell can be prokaryotic (e.g., bacterial cell) or eukaryotic (e.g., mammalian or plant cell). The cell can be of somatic or germ line origin, totipotent or pluripotent, dividing or non-dividing. The cell can also be derived from or can comprise a gamete or embryo, a stem cell, or a fully differentiated cell.

[0217] The siNA molecules of the invention are added directly, or can be complexed with cationic lipids, packaged within liposomes, or otherwise delivered to target cells or tissues. The nucleic acid or nucleic acid complexes can be locally administered to relevant tissues ex vivo, or in vivo through injection, infusion pump or stent, with or without their incorporation in biopolymers. In particular embodiments, the nucleic acid molecules of the invention comprise sequences shown in Tables II-III and/or FIGS. 4-5. Examples of such nucleic acid molecules consist essentially of sequences defined in these tables and figures. Furthermore, the chemically modified constructs described in Table IV can be applied to any siNA sequence of the invention.

[0218] In another aspect, the invention provides mammalian cells containing one or more siNA molecules of this invention. The one or more siNA molecules can independently be targeted to the same or different sites.

[0219] By “RNA” is meant a molecule comprising at least one ribonucleotide residue. By “ribonucleotide” is meant a nucleotide with a hydroxyl group at the 2′ position of a β-D-ribo-furanose moiety. The terms include double-stranded RNA, single-stranded RNA, isolated RNA such as partially purified RNA, essentially pure RNA, synthetic RNA, recombinantly produced RNA, as well as altered RNA that differs from naturally occurring RNA by the addition, deletion, substitution and/or alteration of one or more nucleotides. Such alterations can include addition of non-nucleotide material, such as to the end(s) of the siNA or internally, for example at one or more nucleotides of the RNA. Nucleotides in the RNA molecules of the instant invention can also comprise non-standard nucleotides, such as non-naturally occurring nucleotides or chemically synthesized nucleotides or deoxynucleotides. These altered RNAs can be referred to as analogs or analogs of naturally-occurring RNA.

[0220] By “subject” is meant an organism, which is a donor or recipient of explanted cells or the cells themselves. “Subject” also refers to an organism to which the nucleic acid molecules of the invention can be administered. A subject can be a mammal or mammalian cells, including a human or human cells.

[0221] The term “phosphorothioate” as used herein refers to an internucleotide linkage having Formula I, wherein Z and/or W comprise a sulfur atom. Hence, the term phosphorothioate refers to both phosphorothioate and phosphorodithioate internucleotide linkages.

[0222] The term “phosphonoacetate” as used herein refers to an internucleotide linkage having Formula I, wherein Z and/or W comprise an acetyl or protected acetyl group.

[0223] The term “thiophosphonoacetate” as used herein refers to an internucleotide linkage having Formula I, wherein Z comprises an acetyl or protected acetyl group and W comprises a sulfur atom or alternately W comprises an acetyl or protected acetyl group and Z comprises a sulfur atom.

[0224] The term “universal base” as used herein refers to nucleotide base analogs that form base pairs with each of the natural DNA/RNA bases with little discrimination between them. Non-limiting examples of universal bases include C-phenyl, C-naphthyl and other aromatic derivatives, inosine, azole carboxamides, and nitroazole derivatives such as 3-nitropyrrole, 4-nitroindole, 5-nitroindole, and 6-nitroindole as known in the art (see for example Loakes, 2001, Nucleic Acids Research, 29, 2437-2447).

[0225] The term “acyclic nucleotide” as used herein refers to any nucleotide having an acyclic ribose sugar, for example where any of the ribose carbons (C1, C2, C3, C4, or C5), are independently or in combination absent from the nucleotide.

[0226] The nucleic acid molecules of the instant invention, individually, or in combination or in conjunction with other drugs, can be used to treat diseases or conditions discussed herein (e.g., cancers and other proliferative conditions). For example, to treat a particular disease or condition, the siNA molecules can be administered to a subject or can be administered to other appropriate cells evident to those skilled in the art, individually or in combination with one or more drugs under conditions suitable for the treatment.

[0227] In a further embodiment, the siNA molecules can be used in combination with other known treatments to treat conditions or diseases discussed above. For example, the described molecules could be used in combination with one or more known therapeutic agents to treat a disease or condition. Non-limiting examples of other therapeutic agents that can be readily combined with a siNA molecule of the invention are enzymatic nucleic acid molecules, allosteric nucleic acid molecules, antisense, decoy, or aptamer nucleic acid molecules, antibodies such as monoclonal antibodies, small molecules, and other organic and/or inorganic compounds including metals, salts and ions.

[0228] In one embodiment, the invention features an expression vector comprising a nucleic acid sequence encoding at least one siNA molecule of the invention, in a manner which allows expression of the siNA molecule. For example, the vector can contain sequence(s) encoding both strands of a siNA molecule comprising a duplex. The vector can also contain sequence(s) encoding a single nucleic acid molecule that is self-complementary and thus forms a siNA molecule. Non-limiting examples of such expression vectors are described in Paul et al., 2002, Nature Biotechnology, 19, 505; Miyagishi and Taira, 2002, Nature Biotechnology, 19, 497; Lee et al., 2002, Nature Biotechnology, 19, 500; and Novina et al., 2002, Nature Medicine, advance online publication doi: 10.1038/nm725.

[0229] In another embodiment, the invention features a mammalian cell, for example, a human cell, including an expression vector of the invention.

[0230] In yet another embodiment, the expression vector of the invention comprises a sequence for a siNA molecule having complementarity to a RNA molecule referred to by a Genbank Accession numbers, for example Genbank Accession Nos. shown in Table I.

[0231] In one embodiment, an expression vector of the invention comprises a nucleic acid sequence encoding two or more siNA molecules, which can be the same or different.

[0232] In another aspect of the invention, siNA molecules that interact with target RNA molecules and down-regulate gene encoding target RNA molecules (for example target RNA molecules referred to by Genbank Accession numbers herein) are expressed from transcription units inserted into DNA or RNA vectors. The recombinant vectors can be DNA plasmids or viral vectors. siNA expressing viral vectors can be constructed based on, but not limited to, adeno-associated virus, retrovirus, adenovirus, or alphavirus. The recombinant vectors capable of expressing the siNA molecules can be delivered as described herein, and persist in target cells. Alternatively, viral vectors can be used that provide for transient expression of siNA molecules. Such vectors can be repeatedly administered as necessary. Once expressed, the siNA molecules bind and down-regulate gene function or expression via RNA interference (RNAi). Delivery of siNA expressing vectors can be systemic, such as by intravenous or intramuscular administration, by administration to target cells ex-planted from a subject followed by reintroduction into the subject, or by any other means that would allow for introduction into the desired target cell.

[0233] By “vectors” is meant any nucleic acid- and/or viral-based technique used to deliver a desired nucleic acid.

[0234] Other features and advantages of the invention will be apparent from the following description of the preferred embodiments thereof, and from the claims.

### BRIEF DESCRIPTION OF THE DRAWINGS

[0235] FIG. 1 shows a non-limiting example of a scheme for the synthesis of siNA molecules. The complementary siNA sequence strands, strand 1 and strand 2, are synthesized in tandem and are connected by a cleavable linkage, such as a nucleotide succinate or abasic succinate, which can be the same or different from the cleavable linker used for solid phase synthesis on a solid support. The synthesis can be either solid phase or solution phase, in the example shown, the synthesis is a solid phase synthesis. The synthesis is performed such that a protecting group, such as a dimethoxytrityl group, remains intact on the terminal nucleotide of the tandem oligonucleotide. Upon cleavage and deprotection of the oligonucleotide, the two siNA strands spontaneously hybridize to form a siNA duplex, which allows the purification of the duplex by utilizing the properties of the terminal protecting group, for example by applying a trityl on purification method wherein only duplexes/oligonucleotides with the terminal protecting group are isolated.

[0236] FIG. 2 shows a MALDI-TOF mass spectrum of a purified siNA duplex synthesized by a method of the invention. The two peaks shown correspond to the predicted mass of the separate siNA sequence strands. This result demonstrates that the siNA duplex generated from tandem synthesis can be purified as a single entity using a simple trityl-on purification methodology.

[0237] FIG. 3 shows a non-limiting proposed mechanistic representation of target RNA degradation involved in RNAi. Double-stranded RNA (dsRNA), which is generated by RNA-dependent RNA polymerase (RdRP) from foreign single-stranded RNA, for example viral, transposon, or other exogenous RNA, activates the DICER enzyme that in turn generates siNA duplexes. Alternately, synthetic or expressed siNA can be introduced directly into a cell by appropriate means. An active siNA complex forms which recognizes a target RNA, resulting in degradation of the target RNA by the RISC endonuclease complex or in the synthesis of additional RNA by RNA-dependent RNA polymerase (RdRP), which can activate DICER and result in additional siNA molecules, thereby amplifying the RNAi response.

[0238] FIG. 4A-F shows non-limiting examples of chemically-modified siNA constructs of the present invention. In the figure, N stands for any nucleotide (adenosine, guanosine, cytosine, uridine, or optionally thymidine, for example thymidine can be substituted in the overhanging regions designated by parenthesis (N N). Various modifications are shown for the sense and antisense strands of the siNA constructs.

[0239] FIG. 4A: The sense strand comprises 21 nucleotides wherein the two terminal 3′-nucleotides are optionally base paired and wherein all nucleotides present are ribonucleotides except for (N N) nucleotides, which can comprise ribonucleotides, deoxynucleotides, universal bases, or other chemical modifications described herein. The antisense strand comprises 21 nucleotides, optionally having a 3′-terminal glyceryl moiety wherein the two terminal 3′-nucleotides are optionally complementary to the target RNA sequence, and wherein all nucleotides present are ribonucleotides except for (N N) nucleotides, which can comprise ribonucleotides, deoxynucleotides, universal bases, or other chemical modifications described herein. A modified internucleotide linkage, such as a phosphorothioate, phosphorodithioate or other modified internucleotide linkage as described herein, shown as “s”, optionally connects the (N N) nucleotides in the antisense strand.

[0240] FIG. 4B: The sense strand comprises 21 nucleotides wherein the two terminal 3′-nucleotides are optionally base paired and wherein all pyrimidine nucleotides that may be present are 2′deoxy-2′-fluoro modified nucleotides and all purine nucleotides that may be present are 2′-O-methyl modified nucleotides except for (N N) nucleotides, which can comprise ribonucleotides, deoxynucleotides, universal bases, or other chemical modifications described herein. The antisense strand comprises 21 nucleotides, optionally having a 3′-terminal glyceryl moiety and wherein the two terminal 3′-nucleotides are optionally complementary to the target RNA sequence, and wherein all pyrimidine nucleotides that may be present are 2′-deoxy-2′-fluoro modified nucleotides and all purine nucleotides that may be present are 2′-O-methyl modified nucleotides except for (N N) nucleotides, which can comprise ribonucleotides, deoxynucleotides, universal bases, or other chemical modifications described herein. A modified internucleotide linkage, such as a phosphorothioate, phosphorodithioate or other modified internucleotide linkage as described herein, shown as “s”, optionally connects the (N N) nucleotides in the sense and antisense strand.

[0241] FIG. 4C: The sense strand comprises 21 nucleotides having 5′- and 3′-terminal cap moieties wherein the two terminal 3′-nucleotides are optionally base paired and wherein all pyrimidine nucleotides that may be present are 2′-O-methyl or 2′-deoxy-2′-fluoro modified nucleotides except for (N N) nucleotides, which can comprise ribonucleotides, deoxynucleotides, universal bases, or other chemical modifications described herein. The antisense strand comprises 21 nucleotides, optionally having a 3′-terminal glyceryl moiety and wherein the two terminal 3′-nucleotides are optionally complementary to the target RNA sequence, and wherein all pyrimidine nucleotides that may be present are 2′-deoxy-2′-fluoro modified nucleotides except for (N N) nucleotides, which can comprise ribonucleotides, deoxynucleotides, universal bases, or other chemical modifications described herein. A modified internucleotide linkage, such as a phosphorothioate, phosphorodithioate or other modified internucleotide linkage as described herein, shown as “s”, optionally connects the (N N) nucleotides in the antisense strand.

[0242] FIG. 4D: The sense strand comprises 21 nucleotides having 5′- and 3′-terminal cap moieties wherein the two terminal 3′-nucleotides are optionally base paired and wherein all pyrimidine nucleotides that may be present are 2′-deoxy-2′-fluoro modified nucleotides except for (N N) nucleotides, which can comprise ribonucleotides, deoxynucleotides, universal bases, or other chemical modifications described herein and wherein and all purine nucleotides that may be present are 2′-deoxy nucleotides. The antisense strand comprises 21 nucleotides, optionally having a 3′-terminal glyceryl moiety and wherein the two terminal 3′-nucleotides are optionally complementary to the target RNA sequence, wherein all pyrimidine nucleotides that may be present are 2′-deoxy-2′-fluoro modified nucleotides and all purine nucleotides that may be present are 2′-O-methyl modified nucleotides except for (N N) nucleotides, which can comprise ribonucleotides, deoxynucleotides, universal bases, or other chemical modifications described herein. A modified internucleotide linkage, such as a phosphorothioate, phosphorodithioate or other modified internucleotide linkage as described herein, shown as “s”, optionally connects the (N N) nucleotides in the antisense strand.

[0243] FIG. 4E: The sense strand comprises 21 nucleotides having 5′- and 3′-terminal cap moieties wherein the two terminal 3′-nucleotides are optionally base paired and wherein all pyrimidine nucleotides that may be present are 2′-deoxy-2′-fluoro modified nucleotides except for (N N) nucleotides, which can comprise ribonucleotides, deoxynucleotides, universal bases, or other chemical modifications described herein. The antisense strand comprises 21 nucleotides, optionally having a 3′-terminal glyceryl moiety and wherein the two terminal 3′-nucleotides are optionally complementary to the target RNA sequence, and wherein all pyrimidine nucleotides that may be present are 2′-deoxy-2′-fluoro modified nucleotides and all purine nucleotides that may be present are 2′-O-methyl modified nucleotides except for (N N) nucleotides, which can comprise ribonucleotides, deoxynucleotides, universal bases, or other chemical modifications described herein. A modified internucleotide linkage, such as a phosphorothioate, phosphorodithioate or other modified internucleotide linkage as described herein, shown as “s”, optionally connects the (N N) nucleotides in the antisense strand.

[0244] FIG. 4F: The sense strand comprises 21 nucleotides having 5′- and 3′-terminal cap moieties wherein the two terminal 3′-nucleotides are optionally base paired and wherein all pyrimidine nucleotides that may be present are 2′-deoxy-2′-fluoro modified nucleotides except for (N N) nucleotides, which can comprise ribonucleotides, deoxynucleotides, universal bases, or other chemical modifications described herein and wherein and all purine nucleotides that may be present are 2′-deoxy nucleotides. The antisense strand comprises 21 nucleotides, optionally having a 3′-terminal glyceryl moiety and wherein the two terminal 3′-nucleotides are optionally complementary to the target RNA sequence, and having one 3′-terminal phosphorothioate internucleotide linkage and wherein all pyrimidine nucleotides that may be present are 2′-deoxy-2′-fluoro modified nucleotides and all purine nucleotides that may be present are 2′-deoxy nucleotides except for (N N) nucleotides, which can comprise ribonucleotides, deoxynucleotides, universal bases, or other chemical modifications described herein. A modified internucleotide linkage, such as a phosphorothioate, phosphorodithioate or other modified internucleotide linkage as described herein, shown as “s”, optionally connects the (N N) nucleotides in the antisense strand. The antisense strand of constructs A-F comprise sequence complementary to any target nucleic acid sequence of the invention. Furthermore, when a glyceryl moiety (L) is present at the 3′-end of the antisense strand for any construct shown in FIG. 4 A-F, the modified internucleotide linkage is optional.

[0245] FIG. 5A-F shows non-limiting examples of specific chemically-modified siNA sequences of the invention. A-F applies the chemical modifications described in FIG. 4A-F to a SARS virus siNA sequence. Such chemical modifications can be applied to any SARS sequence and/or SARS polymorphism sequence.

[0246] FIG. 6 shows non-limiting examples of different siNA constructs of the invention. The examples shown (constructs 1, 2, and 3) have 19 representative base pairs; however, different embodiments of the invention include any number of base pairs described herein. Bracketed regions represent nucleotide overhangs, for example comprising about 1, 2, 3, or 4 nucleotides in length, preferably about 2 nucleotides. Constructs 1 and 2 can be used independently for RNAi activity. Construct 2 can comprise a polynucleotide or non-nucleotide linker, which can optionally be designed as a biodegradable linker. In one embodiment, the loop structure shown in construct 2 can comprise a biodegradable linker that results in the formation of construct 1 in vivo and/or in vitro. In another example, construct 3 can be used to generate construct 2 under the same principle wherein a linker is used to generate the active siNA construct 2 in vivo and/or in vitro, which can optionally utilize another biodegradable linker to generate the active siNA construct 1 in vivo and/or in vitro. As such, the stability and/or activity of the siNA constructs can be modulated based on the design of the siNA construct for use in vivo or in vitro and/or in vitro.

[0247] FIG. 7A-C is a diagrammatic representation of a scheme utilized in generating an expression cassette to generate siNA hairpin constructs.

[0248] FIG. 7A: A DNA oligomer is synthesized with a 5′-restriction site (R1) sequence followed by a region having sequence identical (sense region of siNA) to a predetermined SARS target sequence, wherein the sense region comprises, for example, about 19, 20, 21, or 22 nucleotides (N) in length, which is followed by a loop sequence of defined sequence (X), comprising, for example, about 3 to about 10 nucleotides.

[0249] FIG. 7B: The synthetic construct is then extended by DNA polymerase to generate a hairpin structure having self-complementary sequence that will result in a siNA transcript having specificity for a SARS target sequence and having self-complementary sense and antisense regions.

[0250] FIG. 7C: The construct is heated (for example to about 95° C.) to linearize the sequence, thus allowing extension of a complementary second DNA strand using a primer to the 3′-restriction sequence of the first strand. The double-stranded DNA is then inserted into an appropriate vector for expression in cells. The construct can be designed such that a 3′-terminal nucleotide overhang results from the transcription, for example by engineering restriction sites and/or utilizing a poly-U termination region as described in Paul et al., 2002, Nature Biotechnology, 29, 505-508.

[0251] FIG. 8A-C is a diagrammatic representation of a scheme utilized in generating an expression cassette to generate double-stranded siNA constructs.

[0252] FIG. 8A: A DNA oligomer is synthesized with a 5′-restriction (R1) site sequence followed by a region having sequence identical (sense region of siNA) to a predetermined SARS target sequence, wherein the sense region comprises, for example, about 19, 20, 21, or 22 nucleotides (N) in length, and which is followed by a 3′-restriction site (R2) which is adjacent to a loop sequence of defined sequence (X).

[0253] FIG. 8B: The synthetic construct is then extended by DNA polymerase to generate a hairpin structure having self-complementary sequence.

[0254] FIG. 8C: The construct is processed by restriction enzymes specific to R1 and R2 to generate a double-stranded DNA which is then inserted into an appropriate vector for expression in cells. The transcription cassette is designed such that a U6 promoter region flanks each side of the dsDNA which generates the separate sense and antisense strands of the siNA. Poly T termination sequences can be added to the constructs to generate U overhangs in the resulting transcript.

[0255] FIG. 9A-E is a diagrammatic representation of a method used to determine target sites for siNA mediated RNAi within a particular target nucleic acid sequence, such as messenger RNA.

[0256] FIG. 9A: A pool of siNA oligonucleotides are synthesized wherein the antisense region of the siNA constructs has complementarity to target sites across the target nucleic acid sequence, and wherein the sense region comprises sequence complementary to the antisense region of the siNA.

[0257] FIGS. 9B&C: (FIG. 9B) The sequences are pooled and are inserted into vectors such that (FIG. 9C) transfection of a vector into cells results in the expression of the siNA.

[0258] FIG. 9D: Cells are sorted based on phenotypic change that is associated with modulation of the target nucleic acid sequence.

[0259] FIG. 9E: The siNA is isolated from the sorted cells and is sequenced to identify efficacious target sites within the target nucleic acid sequence.

[0260] FIG. 10 shows non-limiting examples of different stabilization chemistries (1-10) that can be used, for example, to stabilize the 3′-end of siNA sequences of the invention, including (1) [3-3′]-inverted deoxyribose; (2) deoxyribonucleotide; (3) [5′-3′]-3′-deoxyribonucleotide; (4) [5′-3′]-ribonucleotide; (5) [5′-3′]-3′-O-methyl ribonucleotide; (6) 3′-glyceryl; (7) [3′-5′]-3′-deoxyribonucleotide; (8) [3′-3′]-deoxyribonucleotide; (9) [5′-2′]-deoxyribonucleotide; and (10) [5-3′]-dideoxyribonucleotide. In addition to modified and unmodified backbone chemistries indicated in the figure, these chemistries can be combined with different backbone modifications as described herein, for example, backbone modifications having Formula I. In addition, the 2′-deoxy nucleotide shown 5′ to the terminal modifications shown can be another modified or unmodified nucleotide or non-nucleotide described herein, for example modifications having any of Formulae I-VII or any combination thereof.

[0261] FIG. 11 shows a non-limiting example of a strategy used to identify chemically modified siNA constructs of the invention that are nuclease resistance while preserving the ability to mediate RNAi activity. Chemical modifications are introduced into the siNA construct based on educated design parameters (e.g. introducing 2′-modifications, base modifications, backbone modifications, terminal cap modifications etc). The modified construct in tested in an appropriate system (e.g. human serum for nuclease resistance, shown, or an animal model for PK/delivery parameters). In parallel, the siNA construct is tested for RNAi activity, for example in a cell culture system such as a luciferase reporter assay). Lead siNA constructs are then identified which possess a particular characteristic while maintaining RNAi activity, and can be further modified and assayed once again. This same approach can be used to identify siNA-conjugate molecules with improved pharmacokinetic profiles, delivery, and RNAi activity.

[0262] FIG. 12 shows non-limiting examples of phosphorylated siNA molecules of the invention, including linear and duplex constructs and asymmetric derivatives thereof.

[0263] FIG. 13 shows non-limiting examples of chemically modified terminal phosphate groups of the invention.

[0264] FIG. 14A shows a non-limiting example of methodology used to design self complementary DFO constructs utilizing palidrome and/or repeat nucleic acid sequences that are identified in a target nucleic acid sequence. (i) A palindrome or repeat sequence is identified in a nucleic acid target sequence. (ii) A sequence is designed that is complementary to the target nucleic acid sequence and the palindrome sequence. (iii) An inverse repeat sequence of the non-palindrome/repeat portion of the complementary sequence is appended to the 3′-end of the complementary sequence to generate a self complementary DFO molecule comprising sequence complementary to the nucleic acid target. (iv) The DFO molecule can self-assemble to form a double stranded oligonucleotide. FIG. 14B shows a non-limiting representative example of a duplex forming oligonucleotide sequence. FIG. 14C shows a non-limiting example of the self assembly schematic of a representative duplex forming oligonucleotide sequence. FIG. 14D shows a non-limiting example of the self assembly schematic of a representative duplex forming oligonucleotide sequence followed by interaction with a target nucleic acid sequence resulting in modulation of gene expression.

[0265] FIG. 15 shows a non-limiting example of the design of self complementary DFO constructs utilizing palidrome and/or repeat nucleic acid sequences that are incorporated into the DFO constructs that have sequence complementary to any target nucleic acid sequence of interest. Incorporation of these palindrome/repeat sequences allow the design of DFO constructs that form duplexes in which each strand is capable of mediating modulation of target gene expression, for example by RNAi. First, the target sequence is identified. A complementary sequence is then generated in which nucleotide or non-nucleotide modifications (shown as X or Y) are introduced into the complementary sequence that generate an artificial palindrome (shown as XYXYXY in the Figure). An inverse repeat of the non-palindrome/repeat complementary sequence is appended to the 3′-end of the complementary sequence to generate a self complementary DFO comprising sequence complementary to the nucleic acid target. The DFO can self-assemble to form a double stranded oligonucleotide.

[0266] FIG. 16 shows non-limiting examples of multifunctional siNA molecules of the invention comprising two separate polynucleotide sequences that are each capable of mediating RNAi directed cleavage of differing target nucleic acid sequences. FIG. 16A shows a non-limiting example of a multifunctional siNA molecule having a first region that is complementary to a first target nucleic acid sequence (complementary region 1) and a second region that is complementary to a second target nucleic acid sequence (complementary region 2), wherein the first and second complementary regions are situated at the 3′-ends of each polynucleotide sequence in the multifunctional siNA. The dashed portions of each polynucleotide sequence of the multifunctional siNA construct have complementarity with regard to corresponding portions of the siNA duplex, but do not have complementarity to the target nucleic acid sequences. FIG. 16B shows a non-limiting example of a multifunctional siNA molecule having a first region that is complementary to a first target nucleic acid sequence (complementary region 1) and a second region that is complementary to a second target nucleic acid sequence (complementary region 2), wherein the first and second complementary regions are situated at the 5′-ends of each polynucleotide sequence in the multifunctional siNA. The dashed portions of each polynucleotide sequence of the multifunctional siNA construct have complementarity with regard to corresponding portions of the siNA duplex, but do not have complementarity to the target nucleic acid sequences.

[0267] FIG. 17 shows non-limiting examples of multifunctional siNA molecules of the invention comprising a single polynucleotide sequence comprising distinct regions that are each capable of mediating RNAi directed cleavage of differing target nucleic acid sequences. FIG. 17A shows a non-limiting example of a multifunctional siNA molecule having a first region that is complementary to a first target nucleic acid sequence (complementary region 1) and a second region that is complementary to a second target nucleic acid sequence (complementary region 2), wherein the second complementary region is situated at the 3′-end of the polynucleotide sequence in the multifunctional siNA. The dashed portions of each polynucleotide sequence of the multifunctional siNA construct have complementarity with regard to corresponding portions of the siNA duplex, but do not have complementarity to the target nucleic acid sequences. FIG. 17B shows a non-limiting example of a multifunctional siNA molecule having a first region that is complementary to a first target nucleic acid sequence (complementary region 1) and a second region that is complementary to a second target nucleic acid sequence (complementary region 2), wherein the first complementary region is situated at the 5′-end of the polynucleotide sequence in the multifunctional siNA. The dashed portions of each polynucleotide sequence of the multifunctional siNA construct have complementarity with regard to corresponding portions of the siNA duplex, but do not have complementarity to the target nucleic acid sequences. In one embodiment, these multifunctional siNA constructs are processed in vivo or in vitro to generate multifunctional siNA constructs as shown in FIG. 16.

[0268] FIG. 18 shows non-limiting examples of multifunctional siNA molecules of the invention comprising two separate polynucleotide sequences that are each capable of mediating RNAi directed cleavage of differing target nucleic acid sequences and wherein the multifunctional siNA construct further comprises a self complementary, palindrome, or repeat region, thus enabling shorter bifunctional siNA constructs that can mediate RNA interference against differing target nucleic acid sequences. FIG. 18A shows a non-limiting example of a multifunctional siNA molecule having a first region that is complementary to a first target nucleic acid sequence (complementary region 1) and a second region that is complementary to a second target nucleic acid sequence (complementary region 2), wherein the first and second complementary regions are situated at the 3′-ends of each polynucleotide sequence in the multifunctional siNA, and wherein the first and second complementary regions further comprise a self complementary, palindrome, or repeat region. The dashed portions of each polynucleotide sequence of the multifunctional siNA construct have complementarity with regard to corresponding portions of the siNA duplex, but do not have complementarity to the target nucleic acid sequences. FIG. 18B shows a non-limiting example of a multifunctional siNA molecule having a first region that is complementary to a first target nucleic acid sequence (complementary region 1) and a second region that is complementary to a second target nucleic acid sequence (complementary region 2), wherein the first and second complementary regions are situated at the 5′-ends of each polynucleotide sequence in the multifunctional siNA, and wherein the first and second complementary regions further comprise a self complementary, palindrome, or repeat region. The dashed portions of each polynucleotide sequence of the multifunctional siNA construct have complementarity with regard to corresponding portions of the siNA duplex, but do not have complementarity to the target nucleic acid sequences.

[0269] FIG. 19 shows non-limiting examples of multifunctional siNA molecules of the invention comprising a single polynucleotide sequence comprising distinct regions that are each capable of mediating RNAi directed cleavage of differing target nucleic acid sequences and wherein the multifunctional siNA construct further comprises a self complementary, palindrome, or repeat region, thus enabling shorter bifunctional siNA constructs that can mediate RNA interference against differing target nucleic acid sequences. FIG. 19A shows a non-limiting example of a multifunctional siNA molecule having a first region that is complementary to a first target nucleic acid sequence (complementary region 1) and a second region that is complementary to a second target nucleic acid sequence (complementary region 2), wherein the second complementary region is situated at the 3′-end of the polynucleotide sequence in the multifunctional siNA, and wherein the first and second complementary regions further comprise a self complementary, palindrome, or repeat region. The dashed portions of each polynucleotide sequence of the multifunctional siNA construct have complementarity with regard to corresponding portions of the siNA duplex, but do not have complementarity to the target nucleic acid sequences. FIG. 19B shows a non-limiting example of a multifunctional siNA molecule having a first region that is complementary to a first target nucleic acid sequence (complementary region 1) and a second region that is complementary to a second target nucleic acid sequence (complementary region 2), wherein the first complementary region is situated at the 5′-end of the polynucleotide sequence in the multifunctional siNA, and wherein the first and second complementary regions further comprise a self complementary, palindrome, or repeat region. The dashed portions of each polynucleotide sequence of the multifunctional siNA construct have complementarity with regard to corresponding portions of the siNA duplex, but do not have complementarity to the target nucleic acid sequences. In one embodiment, these multifunctional siNA constructs are processed in vivo or in vitro to generate multifunctional siNA constructs as shown in FIG. 18.

[0270] FIG. 20 shows a non-limiting example of how multifunctional siNA molecules of the invention can target two separate target nucleic acid molecules, such as separate RNA molecules encoding differing proteins, for example, differing viral strains, a virus and a cellular protein involved in viral infection or replication, or differing proteins involved in a common or divergent biologic pathway that is implicated in the maintenance of progression of disease. Each strand of the multifunctional siNA construct comprises a region having complementarity to separate target nucleic acid molecules. The multifunctional siNA molecule is designed such that each strand of the siNA can be utilized by the RISC complex to initiate RNA interference mediated cleavage of its corresponding target. These design parameters can include destabilization of each end of the siNA construct (see for example Schwarz et al., 2003, Cell, 115, 199-208). Such destabilization can be accomplished for example by using guanosine-cytidine base pairs, alternate base pairs (e.g., wobbles), or destabilizing chemically modified nucleotides at terminal nucleotide positions as is known in the art.

[0271] FIG. 21 shows a non-limiting example of how multifunctional siNA molecules of the invention can target two separate target nucleic acid sequences within the same target nucleic acid molecule, such as alternate coding regions of a RNA, coding and non-coding regions of a RNA, or alternate splice variant regions of a RNA. Each strand of the multifunctional siNA construct comprises a region having complementarity to the separate regions of the target nucleic acid molecule. The multifunctional siNA molecule is designed such that each strand of the siNA can be utilized by the RISC complex to initiate RNA interference mediated cleavage of its corresponding target region. These design parameters can include destabilization of each end of the siNA construct (see for example Schwarz et al., 2003, Cell, 115, 199-208). Such destabilization can be accomplished for example by using guanosine-cytidine base pairs, alternate base pairs (e.g., wobbles), or destabilizing chemically modified nucleotides at terminal nucleotide positions as is known in the art.

### DETAILED DESCRIPTION OF THE INVENTION

Mechanism of Action of Nucleic Acid Molecules of the Invention

[0272] The discussion that follows discusses the proposed mechanism of RNA interference mediated by short interfering RNA as is presently known, and is not meant to be limiting and is not an admission of prior art. Applicant demonstrates herein that chemically-modified short interfering nucleic acids possess similar or improved capacity to mediate RNAi as do siRNA molecules and are expected to possess improved stability and activity in vivo; therefore, this discussion is not meant to be limiting only to siRNA and can be applied to siNA as a whole. By “improved capacity to mediate RNAi” or “improved RNAi activity” is meant to include RNAi activity measured in vitro and/or in vivo where the RNAi activity is a reflection of both the ability of the siNA to mediate RNAi and the stability of the siNAs of the invention. In this invention, the product of these activities can be increased in vitro and/or in vivo compared to an all RNA siRNA or a siNA containing a plurality of ribonucleotides. In some cases, the activity or stability of the siNA molecule can be decreased (i.e., less than ten-fold), but the overall activity of the siNA molecule is enhanced in vitro and/or in vivo.

[0273] RNA interference refers to the process of sequence specific post-transcriptional gene silencing in animals mediated by short interfering RNAs (siRNAs) (Fire et al., 1998, Nature, 391, 806). The corresponding process in plants is commonly referred to as post-transcriptional gene silencing or RNA silencing and is also referred to as quelling in fungi. The process of post-transcriptional gene silencing is thought to be an evolutionarily-conserved cellular defense mechanism used to prevent the expression of foreign genes which is commonly shared by diverse flora and phyla (Fire et al., 1999, Trends Genet., 15, 358). Such protection from foreign gene expression may have evolved in response to the production of double-stranded RNAs (dsRNAs) derived from viral infection or the random integration of transposon elements into a host genome via a cellular response that specifically destroys homologous single-stranded RNA or viral genomic RNA. The presence of dsRNA in cells triggers the RNAi response though a mechanism that has yet to be fully characterized. This mechanism appears to be different from the interferon response that results from dsRNA-mediated activation of protein kinase PKR and 2′,5′-oligoadenylate synthetase resulting in non-specific cleavage of mRNA by ribonuclease L.

[0274] The presence of long dsRNAs in cells stimulates the activity of a ribonuclease III enzyme referred to as Dicer. Dicer is involved in the processing of the dsRNA into short pieces of dsRNA known as short interfering RNAs (siRNAs) (Berstein et al., 2001, Nature, 409, 363). Short interfering RNAs derived from Dicer activity are typically about 21 to about 23 nucleotides in length and comprise about 19 base pair duplexes. Dicer has also been implicated in the excision of 21- and 22-nucleotide small temporal RNAs (stRNAs) from precursor RNA of conserved structure that are implicated in translational control (Hutvagner et al., 2001, Science, 293, 834). The RNAi response also features an endonuclease complex containing a siRNA, commonly referred to as an RNA-induced silencing complex (RISC), which mediates cleavage of single-stranded RNA having sequence homologous to the siRNA. Cleavage of the target RNA takes place in the middle of the region complementary to the guide sequence of the siRNA duplex (Elbashir et al., 2001, Genes Dev., 15, 188). In addition, RNA interference can also involve small RNA (e.g., micro-RNA or miRNA) mediated gene silencing, presumably though cellular mechanisms that regulate chromatin structure and thereby prevent transcription of target gene sequences (see for example Allshire, 2002, Science, 297, 1818-1819; Volpe et al., 2002, Science, 297, 1833-1837; Jenuwein, 2002, Science, 297, 2215-2218; and Hall et al., 2002, Science, 297, 2232-2237). As such, siNA molecules of the invention can be used to mediate gene silencing via interaction with RNA transcripts or alternately by interaction with particular gene sequences, wherein such interaction results in gene silencing either at the transcriptional level or post-transcriptional level.

[0275] RNAi has been studied in a variety of systems. Fire et al., 1998, Nature, 391, 806, were the first to observe RNAi in C. elegans. Wianny and Goetz, 1999, Nature Cell Biol., 2, 70, describe RNAi mediated by dsRNA in mouse embryos. Hammond et al., 2000, Nature, 404, 293, describe RNAi in Drosophila cells transfected with dsRNA. Elbashir et al., 2001, Nature, 411, 494, describe RNAi induced by introduction of duplexes of synthetic 21-nucleotide RNAs in cultured mammalian cells including human embryonic kidney and HeLa cells. Recent work in Drosophila embryonic lysates has revealed certain requirements for siRNA length, structure, chemical composition, and sequence that are essential to mediate efficient RNAi activity. These studies have shown that 21 nucleotide siRNA duplexes are most active when containing two 2-nucleotide 3′-terminal nucleotide overhangs. Furthermore, substitution of one or both siRNA strands with 2′-deoxy or 2′-O-methyl nucleotides abolishes RNAi activity, whereas substitution of 3′-terminal siRNA nucleotides with deoxy nucleotides was shown to be tolerated. Mismatch sequences in the center of the siRNA duplex were also shown to abolish RNAi activity. In addition, these studies also indicate that the position of the cleavage site in the target RNA is defined by the 5′-end of the siRNA guide sequence rather than the 3′-end (Elbashir et al., 2001, EMBO J, 20, 6877). Other studies have indicated that a 5′-phosphate on the target-complementary strand of a siRNA duplex is required for siRNA activity and that ATP is utilized to maintain the 5′-phosphate moiety on the siRNA (Nykanen et al., 2001, Cell, 107, 309); however, siRNA molecules lacking a 5′-phosphate are active when introduced exogenously, suggesting that 5′-phosphorylation of siRNA constructs may occur in vivo.

Synthesis of Nucleic Acid Molecules

[0276] Synthesis of nucleic acids greater than 100 nucleotides in length is difficult using automated methods, and the therapeutic cost of such molecules is prohibitive. In this invention, small nucleic acid motifs (“small” refers to nucleic acid motifs no more than 100 nucleotides in length, preferably no more than 80 nucleotides in length, and most preferably no more than 50 nucleotides in length; e.g., individual siNA oligonucleotide sequences or siNA sequences synthesized in tandem) are preferably used for exogenous delivery. The simple structure of these molecules increases the ability of the nucleic acid to invade targeted regions of protein and/or RNA structure. Exemplary molecules of the instant invention are chemically synthesized, and others can similarly be synthesized.

[0277] Oligonucleotides (e.g., certain modified oligonucleotides or portions of oligonucleotides lacking ribonucleotides) are synthesized using protocols known in the art, for example as described in Caruthers et al., 1992, Methods in Enzymology 211, 3-19, Thompson et al., International PCT Publication No. WO 99/54459, Wincott et al., 1995, Nucleic Acids Res. 23, 2677-2684, Wincott et al., 1997, Methods Mol. Bio., 74, 59, Brennan et al., 1998, Biotechnol Bioeng., 61, 33-45, and Brennan, U.S. Pat. No. 6,001,311. All of these references are incorporated herein by reference. The synthesis of oligonucleotides makes use of common nucleic acid protecting and coupling groups, such as dimethoxytrityl at the 5′-end, and phosphoramidites at the 3′-end. In a non-limiting example, small scale syntheses are conducted on a 394 Applied Biosystems, Inc. synthesizer using a 0.2 μmol scale protocol with a 2.5 min coupling step for 2′-O-methylated nucleotides and a 45 second coupling step for 2′-deoxy nucleotides or 2′-deoxy-2′-fluoro nucleotides. Table V outlines the amounts and the contact times of the reagents used in the synthesis cycle. Alternatively, syntheses at the 0.2 μmol scale can be performed on a 96-well plate synthesizer, such as the instrument produced by Protogene (Palo Alto, Calif.) with minimal modification to the cycle. A 33-fold excess (60 μL of 0.11 M=6.6 μmol) of 2′-O-methyl phosphoramidite and a 105-fold excess of S-ethyl tetrazole (60 μL of 0.25 M=15 μmol) can be used in each coupling cycle of 2′-O-methyl residues relative to polymer-bound 5′-hydroxyl. A 22-fold excess (40 μL of 0.11 M=4.4 μmol) of deoxy phosphoramidite and a 70-fold excess of S-ethyl tetrazole (40 μL of 0.25 M=10 μmol) can be used in each coupling cycle of deoxy residues relative to polymer-bound 5′-hydroxyl. Average coupling yields on the 394 Applied Biosystems, Inc. synthesizer, determined by colorimetric quantitation of the trityl fractions, are typically 97.5-99%. Other oligonucleotide synthesis reagents for the 394 Applied Biosystems, Inc. synthesizer include the following: detritylation solution is 3% TCA in methylene chloride (ABI); capping is performed with 16% N-methyl imidazole in THF (ABI) and 10% acetic anhydride/10% 2,6-lutidine in THF (ABI); and oxidation solution is 16.9 mM 12, 49 mM pyridine, 9% water in THF (PerSeptive Biosystems, Inc.). Burdick & Jackson Synthesis Grade acetonitrile is used directly from the reagent bottle. S-Ethyltetrazole solution (0.25 M in acetonitrile) is made up from the solid obtained from American International Chemical, Inc. Alternately, for the introduction of phosphorothioate linkages, Beaucage reagent (3H-1,2-Benzodithiol-3-one 1,1-dioxide, 0.05 M in acetonitrile) is used.

[0278] Deprotection of the DNA-based oligonucleotides is performed as follows: the polymer-bound trityl-on oligoribonucleotide is transferred to a 4 mL glass screw top vial and suspended in a solution of 40% aqueous methylamine (1 mL) at 65° C. for 10 minutes. After cooling to −20° C., the supernatant is removed from the polymer support. The support is washed three times with 1.0 mL of EtOH:MeCN:H₂O/3:1:1, vortexed and the supernatant is then added to the first supernatant. The combined supernatants, containing the oligoribonucleotide, are dried to a white powder.

[0279] The method of synthesis used for RNA including certain siNA molecules of the invention follows the procedure as described in Usman et al., 1987, J. Am. Chem. Soc., 109, 7845; Scaringe et al., 1990, Nucleic Acids Res., 18, 5433; and Wincott et al., 1995, Nucleic Acids Res. 23, 2677-2684 Wincott et al., 1997, Methods Mol. Bio., 74, 59, and makes use of common nucleic acid protecting and coupling groups, such as dimethoxytrityl at the 5′-end, and phosphoramidites at the 3′-end. In a non-limiting example, small scale syntheses are conducted on a 394 Applied Biosystems, Inc. synthesizer using a 0.2 μmol scale protocol with a 7.5 min coupling step for alkylsilyl protected nucleotides and a 2.5 min coupling step for 2′-O-methylated nucleotides. Table V outlines the amounts and the contact times of the reagents used in the synthesis cycle. Alternatively, syntheses at the 0.2 μmol scale can be done on a 96-well plate synthesizer, such as the instrument produced by Protogene (Palo Alto, Calif.) with minimal modification to the cycle. A 33-fold excess (60 μL of 0.11 M=6.6 μmol) of 2′-O-methyl phosphoramidite and a 75-fold excess of S-ethyl tetrazole (60 μL of 0.25 M=15 μmol) can be used in each coupling cycle of 2′-O-methyl residues relative to polymer-bound 5′-hydroxyl. A 66-fold excess (120 μL of 0.11 M=13.2 μmol) of alkylsilyl (ribo) protected phosphoramidite and a 150-fold excess of S-ethyl tetrazole (120 μL of 0.25 M=30 μmol) can be used in each coupling cycle of ribo residues relative to polymer-bound 5′-hydroxyl. Average coupling yields on the 394 Applied Biosystems, Inc. synthesizer, determined by colorimetric quantitation of the trityl fractions, are typically 97.5-99%. Other oligonucleotide synthesis reagents for the 394 Applied Biosystems, Inc. synthesizer include the following: detritylation solution is 3% TCA in methylene chloride (ABI); capping is performed with 16% N-methyl imidazole in THF (ABI) and 10% acetic anhydride/10% 2,6-lutidine in THF (ABI); oxidation solution is 16.9 mM I₂, 49 mM pyridine, 9% water in THF (PerSeptive Biosystems, Inc.). Burdick & Jackson Synthesis Grade acetonitrile is used directly from the reagent bottle. S-Ethyltetrazole solution (0.25 M in acetonitrile) is made up from the solid obtained from American International Chemical, Inc. Alternately, for the introduction of phosphorothioate linkages, Beaucage reagent (3H-1,2-Benzodithiol-3-one 1,1-dioxide0.05 M in acetonitrile) is used.

[0280] Deprotection of the RNA is performed using either a two-pot or one-pot protocol.

[0281] For the two-pot protocol, the polymer-bound trityl-on oligoribonucleotide is transferred to a 4 mL glass screw top vial and suspended in a solution of 40% aq. methylamine (1 mL) at 65° C. for 10 min. After cooling to −20° C., the supernatant is removed from the polymer support. The support is washed three times with 1.0 mL of EtOH:MeCN:H₂O/3:1:1, vortexed and the supernatant is then added to the first supernatant. The combined supernatants, containing the oligoribonucleotide, are dried to a white powder. The base deprotected oligoribonucleotide is resuspended in anhydrous TEA/HF/NMP solution (300 μL of a solution of 1.5 mL N-methylpyrrolidinone, 750 μL TEA and 1 mL TEA-3HF to provide a 1.4 M HF concentration) and heated to 65° C. After 1.5 h, the oligomer is quenched with 1.5 M NH₄HCO₃.

[0282] Alternatively, for the one-pot protocol, the polymer-bound trityl-on oligoribonucleotide is transferred to a 4 mL glass screw top vial and suspended in a solution of 33% ethanolic methylamine/DMSO:1/1 (0.8 mL) at 65° C. for 15 minutes.

[0283] The vial is brought to room temperature TEA-3HF (0.1 mL) is added and the vial is heated at 65° C. for 15 minutes. The sample is cooled at −20° C. and then quenched with 1.5 M NH₄HCO₃.

[0284] For purification of the trityl-on oligomers, the quenched NH₄HCO₃ solution is loaded onto a C-18 containing cartridge that had been prewashed with acetonitrile followed by 50 mM TEAA. After washing the loaded cartridge with water, the RNA is detritylated with 0.5% TFA for 13 minutes. The cartridge is then washed again with water, salt exchanged with 1 M NaCl and washed with water again. The oligonucleotide is then eluted with 30% acetonitrile.

[0285] The average stepwise coupling yields are typically >98% (Wincott et al., 1995 Nucleic Acids Res. 23, 2677-2684). Those of ordinary skill in the art will recognize that the scale of synthesis can be adapted to be larger or smaller than the example described above including but not limited to 96-well format.

[0286] Alternatively, the nucleic acid molecules of the present invention can be synthesized separately and joined together post-synthetically, for example, by ligation (Moore et al., 1992, Science 256, 9923; Draper et al., International PCT publication No. WO 93/23569; Shabarova et al., 1991, Nucleic Acids Research 19, 4247; Bellon et al., 1997, Nucleosides & Nucleotides, 16, 951; Bellon et al., 1997, Bioconjugate Chem. 8, 204), or by hybridization following synthesis and/or deprotection.

[0287] The siNA molecules of the invention can also be synthesized via a tandem synthesis methodology as described in Example 1 herein, wherein both siNA strands are synthesized as a single contiguous oligonucleotide fragment or strand separated by a cleavable linker which is subsequently cleaved to provide separate siNA fragments or strands that hybridize and permit purification of the siNA duplex. The linker can be a polynucleotide linker or a non-nucleotide linker. The tandem synthesis of siNA as described herein can be readily adapted to both multiwell/multiplate synthesis platforms such as 96 well or similarly larger multi-well platforms. The tandem synthesis of siNA as described herein can also be readily adapted to large scale synthesis platforms employing batch reactors, synthesis columns and the like.

[0288] A siNA molecule can also be assembled from two distinct nucleic acid strands or fragments wherein one fragment includes the sense region and the second fragment includes the antisense region of the RNA molecule.

[0289] The nucleic acid molecules of the present invention can be modified extensively to enhance stability by modification with nuclease resistant groups, for example, 2′-amino, 2′-C-allyl, 2′-fluoro, 2′-O-methyl, 2′-H (for a review see Usman and Cedergren, 1992, TIBS17, 34; Usman et al., 1994, Nucleic Acids Symp. Ser. 31, 163). siNA constructs can be purified by gel electrophoresis using general methods or can be purified by high pressure liquid chromatography (HPLC; see Wincott et al., supra, the totality of which is hereby incorporated herein by reference) and re-suspended in water.

[0290] In another aspect of the invention, siNA molecules of the invention are expressed from transcription units inserted into DNA or RNA vectors. The recombinant vectors can be DNA plasmids or viral vectors. siNA expressing viral vectors can be constructed based on, but not limited to, adeno-associated virus, retrovirus, adenovirus, or alphavirus. The recombinant vectors capable of expressing the siNA molecules can be delivered as described herein, and persist in target cells. Alternatively, viral vectors can be used that provide for transient expression of siNA molecules.

Optimizing Activity of the Nucleic Acid Molecule of the Invention.

[0291] Chemically synthesizing nucleic acid molecules with modifications (base, sugar and/or phosphate) can prevent their degradation by serum ribonucleases, which can increase their potency (see e.g., Eckstein et al., International Publication No. WO 92/07065; Perrault et al., 1990 Nature 344, 565; Pieken et al., 1991, Science 253, 314; Usman and Cedergren, 1992, Trends in Biochem. Sci. 17, 334; Usman et al., International Publication No. WO 93/15187; and Rossi et al., International Publication No. WO 91/03162; Sproat, U.S. Pat. No. 5,334,711; Gold et al., U.S. Pat. No. 6,300,074; and Burgin et al., supra; all of which are incorporated by reference herein). All of the above references describe various chemical modifications that can be made to the base, phosphate and/or sugar moieties of the nucleic acid molecules described herein. Modifications that enhance their efficacy in cells, and removal of bases from nucleic acid molecules to shorten oligonucleotide synthesis times and reduce chemical requirements are desired.

[0292] There are several examples in the art describing sugar, base and phosphate modifications that can be introduced into nucleic acid molecules with significant enhancement in their nuclease stability and efficacy. For example, oligonucleotides are modified to enhance stability and/or enhance biological activity by modification with nuclease resistant groups, for example, 2′-amino, 2′-C-allyl, 2′-fluoro, 2′-O-methyl, 2′-O-allyl, 2′-H, nucleotide base modifications (for a review see Usman and Cedergren, 1992, TIBS. 17, 34; Usman et al., 1994, Nucleic Acids Symp. Ser. 31, 163; Burgin et al., 1996, Biochemistry, 35, 14090). Sugar modification of nucleic acid molecules have been extensively described in the art (see Eckstein et al., International Publication PCT No. WO 92/07065; Perrault et al. Nature, 1990, 344, 565-568; Pieken et al. Science, 1991, 253, 314-317; Usman and Cedergren, Trends in Biochem. Sci., 1992, 17, 334-339; Usman et al. International Publication PCT No. WO 93/15187; Sproat, U.S. Pat. No. 5,334,711 and Beigelman et al., 1995, J. Biol. Chem., 270, 25702; Beigelman et al., International PCT publication No. WO 97/26270; Beigelman et al., U.S. Pat. No. 5,716,824; Usman et al., U.S. Pat. No. 5,627,053; Woolf et al., International PCT Publication No. WO 98/13526; Thompson et al., U.S. Ser. No. 60/082,404 which was filed on Apr. 20, 1998; Karpeisky et al., 1998, Tetrahedron Lett., 39, 1131; Eamshaw and Gait, 1998, Biopolymers (Nucleic Acid Sciences), 48, 39-55; Verma and Eckstein, 1998, Annu. Rev. Biochem., 67, 99-134; and Burlina et al., 1997, Bioorg. Med. Chem., 5, 1999-2010; all of the references are hereby incorporated in their totality by reference herein). Such publications describe general methods and strategies to determine the location of incorporation of sugar, base and/or phosphate modifications and the like into nucleic acid molecules without modulating catalysis, and are incorporated by reference herein. In view of such teachings, similar modifications can be used as described herein to modify the siNA nucleic acid molecules of the instant invention so long as the ability of siNA to promote RNAi is cells is not significantly inhibited.

[0293] While chemical modification of oligonucleotide internucleotide linkages with phosphorothioate, phosphorodithioate, and/or 5′-methylphosphonate linkages improves stability, excessive modifications can cause some toxicity or decreased activity. Therefore, when designing nucleic acid molecules, the amount of these internucleotide linkages should be minimized. The reduction in the concentration of these linkages should lower toxicity, resulting in increased efficacy and higher specificity of these molecules.

[0294] Short interfering nucleic acid (siNA) molecules having chemical modifications that maintain or enhance activity are provided. Such a nucleic acid is also generally more resistant to nucleases than an unmodified nucleic acid. Accordingly, the in vitro and/or in vivo activity should not be significantly lowered. In cases in which modulation is the goal, therapeutic nucleic acid molecules delivered exogenously should optimally be stable within cells until translation of the target RNA has been modulated long enough to reduce the levels of the undesirable protein. This period of time varies between hours to days depending upon the disease state. Improvements in the chemical synthesis of RNA and DNA (Wincott et al., 1995, Nucleic Acids Res. 23, 2677; Caruthers et al., 1992, Methods in Enzymology 211, 3-19 (incorporated by reference herein)) have expanded the ability to modify nucleic acid molecules by introducing nucleotide modifications to enhance their nuclease stability, as described above.

[0295] In one embodiment, nucleic acid molecules of the invention include one or more (e.g., about 1, 2, 3, 4, 5, 6, 7, 8, 9, 10, or more) G-clamp nucleotides. A G-clamp nucleotide is a modified cytosine analog wherein the modifications confer the ability to hydrogen bond both Watson-Crick and Hoogsteen faces of a complementary guanine within a duplex, see for example Lin and Matteucci, 1998, J. Am. Chem. Soc., 120, 8531-8532. A single G-clamp analog substitution within an oligonucleotide can result in substantially enhanced helical thermal stability and mismatch discrimination when hybridized to complementary oligonucleotides. The inclusion of such nucleotides in nucleic acid molecules of the invention results in both enhanced affinity and specificity to nucleic acid targets, complementary sequences, or template strands. In another embodiment, nucleic acid molecules of the invention include one or more (e.g., about 1, 2, 3, 4, 5, 6, 7, 8, 9, 10, or more) LNA “locked nucleic acid” nucleotides such as a 2′,4′-C methylene bicyclo nucleotide (see for example Wengel et al., International PCT Publication No. WO 00/66604 and WO 99/14226).

[0296] In another embodiment, the invention features conjugates and/or complexes of siNA molecules of the invention. Such conjugates and/or complexes can be used to facilitate delivery of siNA molecules into a biological system, such as a cell. The conjugates and complexes provided by the instant invention can impart therapeutic activity by transferring therapeutic compounds across cellular membranes, altering the pharmacokinetics, and/or modulating the localization of nucleic acid molecules of the invention. The present invention encompasses the design and synthesis of novel conjugates and complexes for the delivery of molecules, including, but not limited to, small molecules, lipids, cholesterol, phospholipids, nucleosides, nucleotides, nucleic acids, antibodies, toxins, negatively charged polymers and other polymers, for example proteins, peptides, hormones, carbohydrates, polyethylene glycols, or polyamines, across cellular membranes. In general, the transporters described are designed to be used either individually or as part of a multi-component system, with or without degradable linkers. These compounds are expected to improve delivery and/or localization of nucleic acid molecules of the invention into a number of cell types originating from different tissues, in the presence or absence of serum (see Sullenger and Cech, U.S. Pat. No. 5,854,038). Conjugates of the molecules described herein can be attached to biologically active molecules via linkers that are biodegradable, such as biodegradable nucleic acid linker molecules.

[0297] The term “biodegradable linker” as used herein, refers to a nucleic acid or non-nucleic acid linker molecule that is designed as a biodegradable linker to connect one molecule to another molecule, for example, a biologically active molecule to a siNA molecule of the invention or the sense and antisense strands of a siNA molecule of the invention. The biodegradable linker is designed such that its stability can be modulated for a particular purpose, such as delivery to a particular tissue or cell type. The stability of a nucleic acid-based biodegradable linker molecule can be modulated by using various chemistries, for example combinations of ribonucleotides, deoxyribonucleotides, and chemically-modified nucleotides, such as 2′-O-methyl, 2′-fluoro, 2′-amino, 2′-O-amino, 2′-C-allyl, 2′-O-allyl, and other 2′-modified or base modified nucleotides. The biodegradable nucleic acid linker molecule can be a dimer, trimer, tetramer or longer nucleic acid molecule, for example, an oligonucleotide of about 2, 3, 4, 5, 6, 7, 8, 9, 10, 11, 12, 13, 14, 15, 16, 17, 18, 19, or 20 nucleotides in length, or can comprise a single nucleotide with a phosphorus-based linkage, for example, a phosphoramidate or phosphodiester linkage. The biodegradable nucleic acid linker molecule can also comprise nucleic acid backbone, nucleic acid sugar, or nucleic acid base modifications.

[0298] The term “biodegradable” as used herein, refers to degradation in a biological system, for example enzymatic degradation or chemical degradation.

[0299] The term “biologically active molecule” as used herein, refers to compounds or molecules that are capable of eliciting or modifying a biological response in a system. Non-limiting examples of biologically active siNA molecules either alone or in combination with other molecules contemplated by the instant invention include therapeutically active molecules such as antibodies, cholesterol, hormones, antivirals, peptides, proteins, chemotherapeutics, small molecules, vitamins, co-factors, nucleosides, nucleotides, oligonucleotides, enzymatic nucleic acids, antisense nucleic acids, triplex forming oligonucleotides, 2,5-A chimeras, siNA, dsRNA, allozymes, aptamers, decoys and analogs thereof. Biologically active molecules of the invention also include molecules capable of modulating the pharmacokinetics and/or pharmacodynamics of other biologically active molecules, for example, lipids and polymers such as polyamines, polyamides, polyethylene glycol and other polyethers.

[0300] The term “phospholipid” as used herein, refers to a hydrophobic molecule comprising at least one phosphorus group. For example, a phospholipid can comprise a phosphorus-containing group and saturated or unsaturated alkyl group, optionally substituted with OH, COOH, oxo, amine, or substituted or unsubstituted aryl groups.

[0301] Therapeutic nucleic acid molecules (e.g., siNA molecules) delivered exogenously optimally are stable within cells until reverse transcription of the RNA has been modulated long enough to reduce the levels of the RNA transcript. The nucleic acid molecules are resistant to nucleases in order to function as effective intracellular therapeutic agents. Improvements in the chemical synthesis of nucleic acid molecules described in the instant invention and in the art have expanded the ability to modify nucleic acid molecules by introducing nucleotide modifications to enhance their nuclease stability as described above.

[0302] In yet another embodiment, siNA molecules having chemical modifications that maintain or enhance enzymatic activity of proteins involved in RNAi are provided. Such nucleic acids are also generally more resistant to nucleases than unmodified nucleic acids. Thus, in vitro and/or in vivo the activity should not be significantly lowered. Use of the nucleic acid-based molecules of the invention will lead to better treatment of the disease progression by affording the possibility of combination therapies (e.g., multiple siNA molecules targeted to different genes; nucleic acid molecules coupled with known small molecule modulators; or intermittent treatment with combinations of molecules, including different motifs and/or other chemical or biological molecules). The treatment of subjects with siNA molecules can also include combinations of different types of nucleic acid molecules, such as enzymatic nucleic acid molecules (ribozymes), allozymes, antisense, 2,5-A oligoadenylate, decoys, and aptamers.

[0303] In another aspect a siNA molecule of the invention comprises one or more 5′ and/or a 3′-cap structure, for example on only the sense siNA strand, the antisense siNA strand, or both siNA strands.

[0304] By “cap structure” is meant chemical modifications, which have been incorporated at either terminus of the oligonucleotide (see, for example, Adamic et al., U.S. Pat. No. 5,998,203, incorporated by reference herein). These terminal modifications protect the nucleic acid molecule from exonuclease degradation, and may help in delivery and/or localization within a cell. The cap may be present at the 5′-terminus (5′-cap) or at the 3′-terminal (3′-cap) or may be present on both termini. In non-limiting examples, the 5′-cap includes, but is not limited to, glyceryl, inverted deoxy abasic residue (moiety); 4′,5′-methylene nucleotide; 1-(beta-D-erythrofuranosyl) nucleotide, 4′-thio nucleotide; carbocyclic nucleotide; 1,5-anhydrohexitol nucleotide; L-nucleotides; alpha-nucleotides; modified base nucleotide; phosphorodithioate linkage; threo-pentofuranosyl nucleotide; acyclic 3′,4′-seco nucleotide; acyclic 3,4-dihydroxybutyl nucleotide; acyclic 3,5-dihydroxypentyl nucleotide, 3′-3′-inverted nucleotide moiety; 3′-3′-inverted abasic moiety; 3′-2′-inverted nucleotide moiety; 3′-2′-inverted abasic moiety; 1,4-butanediol phosphate; 3′-phosphoramidate; hexylphosphate; aminohexyl phosphate; 3′-phosphate; 3′-phosphorothioate; phosphorodithioate; or bridging or non-bridging methylphosphonate moiety.

[0305] Non-limiting examples of the 3′-cap include, but are not limited to, glyceryl, inverted deoxy abasic residue (moiety), 4′,5′-methylene nucleotide; I-(beta-D-erythrofuranosyl) nucleotide; 4′-thio nucleotide, carbocyclic nucleotide; 5′-amino-alkyl phosphate; 1,3-diamino-2-propyl phosphate; 3-aminopropyl phosphate; 6-aminohexyl phosphate; 1,2-aminododecyl phosphate; hydroxypropyl phosphate; 1,5-anhydrohexitol nucleotide; L-nucleotide; alpha-nucleotide; modified base nucleotide; phosphorodithioate; threo-pentofuranosyl nucleotide; acyclic 3′,4′-seco nucleotide; 3,4-dihydroxybutyl nucleotide; 3,5-dihydroxypentyl nucleotide, 5′-5′-inverted nucleotide moiety; 5′-5′-inverted abasic moiety; 5′-phosphoramidate; 5′-phosphorothioate; 1,4-butanediol phosphate; 5′-amino; bridging and/or non-bridging 5′-phosphoramidate, phosphorothioate and/or phosphorodithioate, bridging or non bridging methylphosphonate and 5′-mercapto moieties (for more details see Beaucage and Iyer, 1993, Tetrahedron 49, 1925; incorporated by reference herein).

[0306] By the term “non-nucleotide” is meant any group or compound which can be incorporated into a nucleic acid chain in the place of one or more nucleotide units, including either sugar and/or phosphate substitutions, and allows the remaining bases to exhibit their enzymatic activity. The group or compound is abasic in that it does not contain a commonly recognized nucleotide base, such as adenosine, guanine, cytosine, uracil or thymine and therefore lacks a base at the 1′-position.

[0307] An “alkyl” group refers to a saturated aliphatic hydrocarbon, including straight-chain, branched-chain, and cyclic alkyl groups. Preferably, the alkyl group has 1 to 12 carbons. More preferably, it is a lower alkyl of from 1 to 7 carbons, more preferably 1 to 4 carbons. The alkyl group can be substituted or unsubstituted. When substituted the substituted group(s) is preferably, hydroxyl, cyano, alkoxy, ═O, ═S, NO₂ or N(CH₃)₂, amino, or SH. The term also includes alkenyl groups that are unsaturated hydrocarbon groups containing at least one carbon-carbon double bond, including straight-chain, branched-chain, and cyclic groups. Preferably, the alkenyl group has 1 to 12 carbons. More preferably, it is a lower alkenyl of from 1 to 7 carbons, more preferably 1 to 4 carbons. The alkenyl group may be substituted or unsubstituted. When substituted the substituted group(s) is preferably, hydroxyl, cyano, alkoxy, ═O, ═S, NO₂, halogen, N(CH₃)₂, amino, or SH. The term “alkyl” also includes alkynyl groups that have an unsaturated hydrocarbon group containing at least one carbon-carbon triple bond, including straight-chain, branched-chain, and cyclic groups. Preferably, the alkynyl group has 1 to 12 carbons. More preferably, it is a lower alkynyl of from 1 to 7 carbons, more preferably 1 to 4 carbons. The alkynyl group may be substituted or unsubstituted. When substituted the substituted group(s) is preferably, hydroxyl, cyano, alkoxy, ═O, ═S, NO₂ or N(CH₃)₂, amino or SH.

[0308] Such alkyl groups can also include aryl, alkylaryl, carbocyclic aryl, heterocyclic aryl, amide and ester groups. An “aryl” group refers to an aromatic group that has at least one ring having a conjugated pi electron system and includes carbocyclic aryl, heterocyclic aryl and biaryl groups, all of which may be optionally substituted. The preferred substituent(s) of aryl groups are halogen, trihalomethyl, hydroxyl, SH, OH, cyano, alkoxy, alkyl, alkenyl, alkynyl, and amino groups. An “alkylaryl” group refers to an alkyl group (as described above) covalently joined to an aryl group (as described above). Carbocyclic aryl groups are groups wherein the ring atoms on the aromatic ring are all carbon atoms. The carbon atoms are optionally substituted. Heterocyclic aryl groups are groups having from 1 to 3 heteroatoms as ring atoms in the aromatic ring and the remainder of the ring atoms are carbon atoms. Suitable heteroatoms include oxygen, sulfur, and nitrogen, and include furanyl, thienyl, pyridyl, pyrrolyl, N-lower alkyl pyrrolo, pyrimidyl, pyrazinyl, imidazolyl and the like, all optionally substituted. An “amide” refers to an —C(O)—NH—R, where R is either alkyl, aryl, alkylaryl or hydrogen. An “ester” refers to an —C(O)—OR′, where R is either alkyl, aryl, alkylaryl or hydrogen.

[0309] By “nucleotide” as used herein is as recognized in the art to include natural bases (standard), and modified bases well known in the art. Such bases are generally located at the 1′ position of a nucleotide sugar moiety. Nucleotides generally comprise a base, sugar and a phosphate group. The nucleotides can be unmodified or modified at the sugar, phosphate and/or base moiety, (also referred to interchangeably as nucleotide analogs, modified nucleotides, non-natural nucleotides, non-standard nucleotides and other; see, for example, Usman and McSwiggen, supra; Eckstein et al., International PCT Publication No. WO 92/07065; Usman et al., International PCT Publication No. WO 93/15187; Uhlman & Peyman, supra, all are hereby incorporated by reference herein). There are several examples of modified nucleic acid bases known in the art as summarized by Limbach et al., 1994, Nucleic Acids Res. 22, 2183. Some of the non-limiting examples of base modifications that can be introduced into nucleic acid molecules include, inosine, purine, pyridin-4-one, pyridin-2-one, phenyl, pseudouracil, 2, 4, 6-trimethoxy benzene, 3-methyl uracil, dihydrouridine, naphthyl, aminophenyl, 5-alkylcytidines (e.g., 5-methylcytidine), 5-alkyluridines (e.g., ribothymidine), 5-halouridine (e.g., 5-bromouridine) or 6-azapyrimidines or 6-alkylpyrimidines (e.g. 6-methyluridine), propyne, and others (Burgin et al., 1996, Biochemistry, 35, 14090; Uhlman & Peyman, supra). By “modified bases” in this aspect is meant nucleotide bases other than adenine, guanine, cytosine and uracil at 1′ position or their equivalents.

[0310] In one embodiment, the invention features modified siNA molecules, with phosphate backbone modifications comprising one or more phosphorothioate, phosphorodithiQate, methylphosphonate, phosphotriester, morpholino, amidate carbamate, carboxymethyl, acetamidate, polyamide, sulfonate, sulfonamide, sulfamate, formacetal, thioformacetal, and/or alkylsilyl, substitutions. For a review of oligonucleotide backbone modifications, see Hunziker and Leumann, 1995, Nucleic Acid Analogues: Synthesis and Properties, in Modern Synthetic Methods, VCH, 331-417, and Mesmaeker et al., 1994, Novel Backbone Replacements for Oligonucleotides, in Carbohydrate Modifications in Antisense Research, ACS, 24-39.

[0311] By “abasic” is meant sugar moieties lacking a base or having other chemical groups in place of a base at the 1′ position, see for example Adamic et al., U.S. Pat. No. 5,998,203.

[0312] By “unmodified nucleoside” is meant one of the bases adenine, cytosine, guanine, thymine, or uracil joined to the 1′ carbon of β-D-ribo-furanose.

[0313] By “modified nucleoside” is meant any nucleotide base which contains a modification in the chemical structure of an unmodified nucleotide base, sugar and/or phosphate. Non-limiting examples of modified nucleotides are shown by Formulae I-VII and/or other modifications described herein.

[0314] In connection with 2′-modified nucleotides as described for the present invention, by “amino” is meant 2′—NH₂ or 2′-O—NH₂, which can be modified or unmodified. Such modified groups are described, for example, in Eckstein et al., U.S. Pat. No. 5,672,695 and Matulic-Adamic et al., U.S. Pat. No. 6,248,878, which are both incorporated by reference in their entireties.

[0315] Various modifications to nucleic acid siNA structure can be made to enhance the utility of these molecules. Such modifications will enhance shelf-life, half-life in vitro, stability, and ease of introduction of such oligonucleotides to the target site, e.g., to enhance penetration of cellular membranes, and confer the ability to recognize and bind to targeted cells.

Administration of Nucleic Acid Molecules

[0316] A siRNA molecule of the invention can be adapted for use to treat for example SARS virus infection, acute respiratory failure, viral pneumonia, and other indications that can respond to the level of SARS in a cell or tissue, alone or in combination with other therapies. For example, a siNA molecule can comprise a delivery vehicle, including liposomes, for administration to a subject, carriers and diluents and their salts, and/or can be present in pharmaceutically acceptable formulations. Methods for the delivery of nucleic acid molecules are described in Akhtar et al., 1992, Trends Cell Bio., 2, 139; Delivery Strategies for Antisense Oligonucleolide Therapeutics, ed. Akhtar, 1995, Maurer et al., 1999, Mol. Membr. Biol., 16, 129-140; Hofland and Huang, 1999, Handb. Exp. Pharmacol., 137, 165-192; and Lee et al., 2000, ACS Symp. Ser., 752, 184-192, all of which are incorporated herein by reference. Beigelman et al., U.S. Pat. No. 6,395,713 and Sullivan et al., PCT WO 94/02595 further describe the general methods for delivery of nucleic acid molecules. These protocols can be utilized for the delivery of virtually any nucleic acid molecule. Nucleic acid molecules can be administered to cells by a variety of methods known to those of skill in the art, including, but not restricted to, encapsulation in liposomes, by iontophoresis, or by incorporation into other vehicles, such as biodegradable polymers, hydrogels, cyclodextrins (see for example Gonzalez et al., 1999, Bioconjugate Chem., 10, 1068-1074; Wang et al., International PCT publication Nos. WO 03/47518 and WO 03/46185), poly(lactic-co-glycolic)acid (PLGA) and PLCA microspheres (see for example U.S. Pat. No. 6,447,796 and US Patent Application Publication No. US 2002130430), biodegradable nanocapsules, and bioadhesive microspheres, or by proteinaceous vectors (O'Hare and Normand, International PCT Publication No. WO 00/53722). In another embodiment, the nucleic acid molecules of the invention can also be formulated or complexed with polyethyleneimine and derivatives thereof, such as polyethyleneimine-polyethyleneglycol-N-acetylgalactosamine (PEI-PEG-GAL) or polyethyleneimine-polyethyleneglycol-tri-N-acetylgalactosamine (PEI-PEG-triGAL) derivatives. Alternatively, the nucleic acid/vehicle combination is locally delivered by direct injection or by use of an infusion pump.

[0317] In one embodiment, the nucleic acid molecules or the invention are administered via pulmonary delivery, such as by inhalation of an aerosol or spray dried formulation administered by an inhalation device or nebulizer, providing rapid local uptake of the nucleic acid molecules into relevant pulmonary tissues. Solid particulate compositions containing respirable dry particles of micronized nucleic acid compositions can be prepared by grinding dried or lyophilized nucleic acid compositions, and then passing the micronized composition through, for example, a 400 mesh screen to break up or separate out large agglomerates. A solid particulate composition comprising the nucleic acid compositions of the invention can optionally contain a dispersant which serves to facilitate the formation of an aerosol as well as other therapeutic compounds. A suitable dispersant is lactose, which can be blended with the nucleic acid compound in any suitable ratio, such as a 1 to 1 ratio by weight.

[0318] Aerosols of liquid particles comprising a nucleic acid composition of the invention can be produced by any suitable means, such as with a nebulizer (see for example U.S. Pat. No. 4,501,729). Nebulizers are commercially available devices which transform solutions or suspensions of an active ingredient into a therapeutic aerosol mist either by means of acceleration of a compressed gas, typically air or oxygen, through a narrow venturi orifice or by means of ultrasonic agitation. Suitable formulations for use in nebulizers comprise the active ingredient in a liquid carrier in an amount of up to 40% w/w preferably less than 20% w/w of the formulation. The carrier is typically water or a dilute aqueous alcoholic solution, preferably made isotonic with body fluids by the addition of, for example, sodium chloride or other suitable salts. Optional additives include preservatives if the formulation is not prepared sterile, for example, methyl hydroxybenzoate, anti-oxidants, flavorings, volatile oils, buffering agents and emulsifiers and other formulation surfactants. The aerosols of solid particles comprising the active composition and surfactant can likewise be produced with any solid particulate aerosol generator. Aerosol generators for administering solid particulate therapeutics to a subject produce particles which are respirable, as explained above, and generate a volume of aerosol containing a predetermined metered dose of a therapeutic composition at a rate suitable for human administration. One illustrative type of solid particulate aerosol generator is an insufflator. Suitable formulations for administration by insufflation include finely comminuted powders which can be delivered by means of an insufflator. In the insufflator, the powder, e.g., a metered dose thereof effective to carry out the treatments described herein, is contained in capsules or cartridges, typically made of gelatin or plastic, which are either pierced or opened in situ and the powder delivered by air drawn through the device upon inhalation or by means of a manually-operated pump. The powder employed in the insufflator consists either solely of the active ingredient or of a powder blend comprising the active ingredient, a suitable powder diluent, such as lactose, and an optional surfactant. The active ingredient typically comprises from 0.1 to 100 w/w of the formulation. A second type of illustrative aerosol generator comprises a metered dose inhaler. Metered dose inhalers are pressurized aerosol dispensers, typically containing a suspension or solution formulation of the active ingredient in a liquified propellant. During use these devices discharge the formulation through a valve adapted to deliver a metered volume to produce a fine particle spray containing the active ingredient. Suitable propellants include certain chlorofluorocarbon compounds for example, dichlorodifluoromethane, trichlorofluoromethane, dichlorotetrafluoroethane and mixtures thereof. The formulation can additionally contain one or more co-solvents, for example, ethanol, emulsifiers and other formulation surfactants, such as oleic acid or sorbitan trioleate, anti-oxidants and suitable flavoring agents. Other methods for pulmonary delivery are described in, for example US Patent Application No. 20040037780, and U.S. Pat. Nos. 6,592,904; 6,582,728; 6,565,885.

[0319] In one embodiment, a siNA molecule of the invention is complexed with membrane disruptive agents such as those described in U.S. Patent Application Publication No. 20010007666, incorporated by reference herein in its entirety including the drawings. In another embodiment, the membrane disruptive agent or agents and the siNA molecule are also complexed with a cationic lipid or helper lipid molecule, such as those lipids described in U.S. Pat. No. 6,235,310, incorporated by reference herein in its entirety including the drawings.

[0320] Thus, the invention features a pharmaceutical composition comprising one or more nucleic acid(s) of the invention in an acceptable carrier, such as a stabilizer, buffer, and the like. The polynucleotides of the invention can be administered (e.g., RNA, DNA or protein) and introduced into a subject by any standard means, with or without stabilizers, buffers, and the like, to form a pharmaceutical composition. When it is desired to use a liposome delivery mechanism, standard protocols for formation of liposomes can be followed. The compositions of the present invention can also be formulated and used as tablets, capsules or elixirs for oral administration, suppositories for rectal administration, sterile solutions, suspensions for injectable administration, and the other compositions known in the art.

[0321] The present invention also includes pharmaceutically acceptable formulations of the compounds described. These formulations include salts of the above compounds, e.g., acid addition salts, for example, salts of hydrochloric, hydrobromic, acetic acid, and benzene sulfonic acid.

[0322] A pharmacological composition or formulation refers to a composition or formulation in a form suitable for administration, e.g., systemic administration, into a cell or subject, including for example a human. Suitable forms, in part, depend upon the use or the route of entry, for example oral, transdermal, or by injection. Such forms should not prevent the composition or formulation from reaching a target cell (i.e., a cell to which the negatively charged nucleic acid is desirable for delivery). For example, pharmacological compositions injected into the blood stream should be soluble. Other factors are known in the art, and include considerations such as toxicity and forms that prevent the composition or formulation from exerting its effect.

[0323] By “systemic administration” is meant in vivo systemic absorption or accumulation of drugs in the blood stream followed by distribution throughout the entire body. Administration routes that lead to systemic absorption include, without limitation: intravenous, subcutaneous, intraperitoneal, inhalation, oral, intrapulmonary and intramuscular. Each of these administration routes exposes the siNA molecules of the invention to an accessible diseased tissue. The rate of entry of a drug into the circulation has been shown to be a function of molecular weight or size. The use of a liposome or other drug carrier comprising the compounds of the instant invention can potentially localize the drug, for example, in certain tissue types, such as the tissues of the reticular endothelial system (RES). A liposome formulation that can facilitate the association of drug with the surface of cells, such as, lymphocytes and macrophages is also useful. This approach can provide enhanced delivery of the drug to target cells by taking advantage of the specificity of macrophage and lymphocyte immune recognition of abnormal cells, such as cells producing excess repeat expansion genes.

[0324] By “pharmaceutically acceptable formulation” is meant, a composition or formulation that allows for the effective distribution of the nucleic acid molecules of the instant invention in the physical location most suitable for their desired activity. Non-limiting examples of agents suitable for formulation with the nucleic acid molecules of the instant invention include: P-glycoprotein inhibitors (such as Pluronic P85); biodegradable polymers, such as poly (DL-lactide-coglycolide) microspheres for sustained release delivery (Emerich, D F et al, 1999, Cell Transplant, 8, 47-58); and loaded nanoparticles, such as those made of polybutylcyanoacrylate. Other non-limiting examples of delivery strategies for the nucleic acid molecules of the instant invention include material described in Boado et al., 1998, J. Pharm. Sci., 87, 1308-1315; Tyler et al., 1999, FEBS Lett., 421, 280-284; Pardridge et al., 1995, PNAS USA., 92, 5592-5596; Boado, 1995, Adv. Drug Delivery Rev., 15, 73-107; Aldrian-Herrada et al., 1998, Nucleic Acids Res., 26, 4910-4916; and Tyler et al., 1999, PNAS USA., 96, 7053-7058.

[0325] The invention also features the use of the composition comprising surface-modified liposomes containing poly (ethylene glycol) lipids (PEG-modified, or long-circulating liposomes or stealth liposomes). These formulations offer a method for increasing the accumulation of drugs in target tissues. This class of drug carriers resists opsonization and elimination by the mononuclear phagocytic system (MPS or RES), thereby enabling longer blood circulation times and enhanced tissue exposure for the encapsulated drug (Lasic et al. Chem. Rev. 1995, 95, 2601-2627; Ishiwata et al., Chem. Pharm. Bull. 1995, 43, 1005-1011). Such liposomes have been shown to accumulate selectively in tumors, presumably by extravasation and capture in the neovascularized target tissues (Lasic et al., Science 1995, 267, 1275-1276; Oku et al., 1995, Biochim. Biophtys. Acta, 1238, 86-90). The long-circulating liposomes enhance the pharmacokinetics and pharmacodynamics of DNA and RNA, particularly compared to conventional cationic liposomes which are known to accumulate in tissues of the MPS (Liu et al., J. Biol. Chem. 1995, 42, 24864-24870; Choi et al., International PCT Publication No. WO 96/10391; Ansell et al., International PCT Publication No. WO 96/10390; Holland et al., International PCT Publication No. WO 96/10392). Long-circulating liposomes are also likely to protect drugs from nuclease degradation to a greater extent compared to cationic liposomes, based on their ability to avoid accumulation in metabolically aggressive MPS tissues such as the liver and spleen.

[0326] The present invention also includes compositions prepared for storage or administration that include a pharmaceutically effective amount of the desired compounds in a pharmaceutically acceptable carrier or diluent. Acceptable carriers or diluents for therapeutic use are well known in the pharmaceutical art, and are described, for example, in Remington's Pharmaceutical Sciences, Mack Publishing Co. (A. R. Gennaro edit. 1985), hereby incorporated by reference herein. For example, preservatives, stabilizers, dyes and flavoring agents can be provided. These include sodium benzoate, sorbic acid and esters of p-hydroxybenzoic acid. In addition, antioxidants and suspending agents can be used.

[0327] A pharmaceutically effective dose is that dose required to prevent, inhibit the occurrence, or treat (alleviate a symptom to some extent, preferably all of the symptoms) of a disease state. The pharmaceutically effective dose depends on the type of disease, the composition used, the route of administration, the type of mammal being treated, the physical characteristics of the specific mammal under consideration, concurrent medication, and other factors that those skilled in the medical arts will recognize. Generally, an amount between 0.1 mg/kg and 100 mg/kg body weight/day of active ingredients is administered dependent upon potency of the negatively charged polymer.

[0328] The nucleic acid molecules of the invention and formulations thereof can be administered orally, topically, parenterally, by inhalation or spray, or rectally in dosage unit formulations containing conventional non-toxic pharmaceutically acceptable carriers, adjuvants and/or vehicles. The term parenteral as used herein includes percutaneous, subcutaneous, intravascular (e.g., intravenous), intramuscular, or intrathecal injection or infusion techniques and the like. In addition, there is provided a pharmaceutical formulation comprising a nucleic acid molecule of the invention and a pharmaceutically acceptable carrier. One or more nucleic acid molecules of the invention can be present in association with one or more non-toxic pharmaceutically acceptable carriers and/or diluents and/or adjuvants, and if desired other active ingredients. The pharmaceutical compositions containing nucleic acid molecules of the invention can be in a form suitable for oral use, for example, as tablets, troches, lozenges, aqueous or oily suspensions, dispersible powders or granules, emulsion, hard or soft capsules, or syrups or elixirs.

[0329] Compositions intended for oral use can be prepared according to any method known to the art for the manufacture of pharmaceutical compositions and such compositions can contain one or more such sweetening agents, flavoring agents, coloring agents or preservative agents in order to provide pharmaceutically elegant and palatable preparations. Tablets contain the active ingredient in admixture with non-toxic pharmaceutically acceptable excipients that are suitable for the manufacture of tablets. These excipients can be, for example, inert diluents; such as calcium carbonate, sodium carbonate, lactose, calcium phosphate or sodium phosphate; granulating and disintegrating agents, for example, corn starch, or alginic acid; binding agents, for example starch, gelatin or acacia; and lubricating agents, for example magnesium stearate, stearic acid or talc. The tablets can be uncoated or they can be coated by known techniques. In some cases such coatings can be prepared by known techniques to delay disintegration and absorption in the gastrointestinal tract and thereby provide a sustained action over a longer period. For example, a time delay material such as glyceryl monosterate or glyceryl distearate can be employed.

[0330] Formulations for oral use can also be presented as hard gelatin capsules wherein the active ingredient is mixed with an inert solid diluent, for example, calcium carbonate, calcium phosphate or kaolin, or as soft gelatin capsules wherein the active ingredient is mixed with water or an oil medium, for example peanut oil, liquid paraffin or olive oil.

[0331] Aqueous suspensions contain the active materials in a mixture with excipients suitable for the manufacture of aqueous suspensions. Such excipients are suspending agents, for example sodium carboxymethylcellulose, methylcellulose, hydropropyl-methylcellulose, sodium alginate, polyvinylpyrrolidone, gum tragacanth and gum acacia; dispersing or wetting agents can be a naturally-occurring phosphatide, for example, lecithin, or condensation products of an alkylene oxide with fatty acids, for example polyoxyethylene stearate, or condensation products of ethylene oxide with long chain aliphatic alcohols, for example heptadecaethyleneoxycetanol, or condensation products of ethylene oxide with partial esters derived from fatty acids and a hexitol such as polyoxyethylene sorbitol monooleate, or condensation products of ethylene oxide with partial esters derived from fatty acids and hexitol anhydrides, for example polyethylene sorbitan monooleate. The aqueous suspensions can also contain one or more preservatives, for example ethyl, or n-propyl p-hydroxybenzoate, one or more coloring agents, one or more flavoring agents, and one or more sweetening agents, such as sucrose or saccharin.

[0332] Oily suspensions can be formulated by suspending the active ingredients in a vegetable oil, for example arachis oil, olive oil, sesame oil or coconut oil, or in a mineral oil such as liquid paraffin. The oily suspensions can contain a thickening agent, for example beeswax, hard paraffin or cetyl alcohol. Sweetening agents and flavoring agents can be added to provide palatable oral preparations. These compositions can be preserved by the addition of an anti-oxidant such as ascorbic acid

[0333] Dispersible powders and granules suitable for preparation of an aqueous suspension by the addition of water provide the active ingredient in admixture with a dispersing or wetting agent, suspending agent and one or more preservatives. Suitable dispersing or wetting agents or suspending agents are exemplified by those already mentioned above. Additional excipients, for example sweetening, flavoring and coloring agents, can also be present.

[0334] Pharmaceutical compositions of the invention can also be in the form of oil-in-water emulsions. The oily phase can be a vegetable oil or a mineral oil or mixtures of these. Suitable emulsifying agents can be naturally-occurring gums, for example gum acacia or gum tragacanth, naturally-occurring phosphatides, for example soy bean, lecithin, and esters or partial esters derived from fatty acids and hexitol, anhydrides, for example sorbitan monooleate, and condensation products of the said partial esters with ethylene oxide, for example polyoxyethylene sorbitan monooleate. The emulsions can also contain sweetening and flavoring agents.

[0335] Syrups and elixirs can be formulated with sweetening agents, for example glycerol, propylene glycol, sorbitol, glucose or sucrose. Such formulations can also contain a demulcent, a preservative and flavoring and coloring agents. The pharmaceutical compositions can be in the form of a sterile injectable aqueous or oleaginous suspension. This suspension can be formulated according to the known art using those suitable dispersing or wetting agents and suspending agents that have been mentioned above. The sterile injectable preparation can also be a sterile injectable solution or suspension in a non-toxic parentally acceptable diluent or solvent, for example as a solution in 1,3-butanediol. Among the acceptable vehicles and solvents that can be employed are water, Ringer's solution and isotonic sodium chloride solution. In addition, sterile, fixed oils are conventionally employed as a solvent or suspending medium. For this purpose, any bland fixed oil can be employed including synthetic mono- or diglycerides. In addition, fatty acids such as oleic acid find use in the preparation of injectables.

[0336] The nucleic acid molecules of the invention can also be administered in the form of suppositories, e.g., for rectal administration of the drug. These compositions can be prepared by mixing the drug with a suitable non-irritating excipient that is solid at ordinary temperatures but liquid at the rectal temperature and will therefore melt in the rectum to release the drug. Such materials include cocoa butter and polyethylene glycols.

[0337] Nucleic acid molecules of the invention can be administered parenterally in a sterile medium. The drug, depending on the vehicle and concentration used, can either be suspended or dissolved in the vehicle. Advantageously, adjuvants such as local anesthetics, preservatives and buffering agents can be dissolved in the vehicle. Dosage levels of the order of from about 0.1 mg to about 140 mg per kilogram of body weight per day are useful in the treatment of the above-indicated conditions (about 0.5 mg to about 7 g per subject per day). The amount of active ingredient that can be combined with the carrier materials to produce a single dosage form varies depending upon the host treated and the particular mode of administration. Dosage unit forms generally contain between from about 1 mg to about 500 mg of an active ingredient. It is understood that the specific dose level for any particular subject depends upon a variety of factors including the activity of the specific compound employed, the age, body weight, general health, sex, diet, time of administration, route of administration, and rate of excretion, drug combination and the severity of the particular disease undergoing therapy.

[0338] For administration to non-human animals, the composition can also be added to the animal feed or drinking water. It can be convenient to formulate the animal feed and drinking water compositions so that the animal takes in a therapeutically appropriate quantity of the composition along with its diet. It can also be convenient to present the composition as a premix for addition to the feed or drinking water.

[0339] The nucleic acid molecules of the present invention can also be administered to a subject in combination with other therapeutic compounds to increase the overall therapeutic effect. The use of multiple compounds to treat an indication can increase the beneficial effects while reducing the presence of side effects.

[0340] In one embodiment, the invention comprises compositions suitable for administering nucleic acid molecules of the invention to specific cell types. For example, the asialoglycoprotein receptor (ASGPr) (Wu and Wu, 1987, J. Biol. Chem. 262, 4429-4432) is unique to hepatocytes and binds branched galactose-terminal glycoproteins, such as asialoorosomucoid (ASOR). In another example, the folate receptor is overexpressed in many cancer cells. Binding of such glycoproteins, synthetic glycoconjugates, or folates to the receptor takes place with an affinity that strongly depends on the degree of branching of the oligosaccharide chain, for example, triatennary structures are bound with greater affinity than biatenarry or monoatennary chains (Baenziger and Fiete, 1980, Cell, 22, 611-620; Connolly et al., 1982, J. Biol. Chem., 257, 939-945). Lee and Lee, 1987, Glycoconjugate J., 4, 317-328, obtained this high specificity through the use of N-acetyl-D-galactosamine as the carbohydrate moiety, which has higher affinity for the receptor, compared to galactose. This “clustering effect” has also been described for the binding and uptake of mannosyl-terminating glycoproteins or glycoconjugates (Ponpipom et al., 1981, J. Med. Chem., 24, 1388-1395). The use of galactose, galactosamine, or folate based conjugates to transport exogenous compounds across cell membranes can provide a targeted delivery approach to, for example, the treatment of liver disease, cancers of the liver, or other cancers. The use of bioconjugates can also provide a reduction in the required dose of therapeutic compounds required for treatment. Furthermore, therapeutic bioavailability, pharmacodynamics, and pharmacokinetic parameters can be modulated through the use of nucleic acid bioconjugates of the invention. Non-limiting examples of such bioconjugates are described in Vargeese et al., U.S. Ser. No. 10/201,394, filed Aug. 13, 2001; and Matulic-Adamic et al., U.S. Ser. No. 10/151,116, filed May 17, 2002. In one embodiment, nucleic acid molecules of the invention are complexed with or covalently attached to nanoparticles, such as Hepatitis B virus S, M, or IL envelope proteins (see for example Yamado et al., 2003, Nature Biotechnology, 21, 885). In one embodiment, nucleic acid molecules of the invention are delivered with specificity for human tumor cells, specifically non-apoptotic human tumor cells including for example T-cells, hepatocytes, breast carcinoma cells, ovarian carcinoma cells, melanoma cells, intestinal epithelial cells, prostate cells, testicular cells, non-small cell lung cancers, small cell lung cancers, etc.

[0341] Alternatively, certain siNA molecules of the instant invention can be expressed within cells from eukaryotic promoters (e.g., Izant and Weintraub, 1985, Science, 229, 345; McGarry and Lindquist, 1986, Proc. Natl. Acad. Sci., USA 83, 399; Scanlon et al., 1991, Proc. Nail. Acad. Sci. USA, 88, 10591-5; Kashani-Sabet et al., 1992, Antisense Res. Dev., 2, 3-15; propulic et al., 1992, J. Virol., 66, 1432-41; Weerasinghe et al., 1991, J. Virol., 65, 5531-4; Ojwang et al., 1992, Proc. Natl. Acad. Sci. USA, 89, 10802-6; Chen et al., 1992, Nucleic Acids Res., 20, 4581-9; Sarver et al., 1990 Science, 247, 1222-1225; Thompson et al., 1995, Nucleic Acids Res., 23, 2259; Good et al., 1997, Gene Therapy, 4, 45. Those skilled in the art realize that any nucleic acid can be expressed in eukaryotic cells from the appropriate DNA/RNA vector. The activity of such nucleic acids can be augmented by their release from the primary transcript by a enzymatic nucleic acid (Draper et al., PCT WO 93/23569, and Sullivan et al., PCT WO 94/02595; Ohkawa et al., 1992, Nucleic Acids Symp. Ser. 27, 15-6; Taira et al., 1991, Nucleic Acids Res., 19, 5125-30; Ventura et al., 1993, Nucleic Acids Res., 21, 3249-55; Chowrira et al., 1994, J. Biol. Chem., 269, 25856.

[0342] In another aspect of the invention, RNA molecules of the present invention can be expressed from transcription units (see for example Couture et al., 1996, TIG., 12, 510) inserted into DNA or RNA vectors. The recombinant vectors can be DNA plasmids or viral vectors. siNA expressing viral vectors can be constructed based on, but not limited to, adeno-associated virus, retrovirus, adenovirus, or alphavirus. In another embodiment, pol III based constructs are used to express nucleic acid molecules of the invention (see for example Thompson, U.S. Pats. Nos. 5,902,880 and 6,146,886). The recombinant vectors capable of expressing the siNA molecules can be delivered as described above, and persist in target cells. Alternatively, viral vectors can be used that provide for transient expression of nucleic acid molecules. Such vectors can be repeatedly administered as necessary. Once expressed, the siNA molecule interacts with the target mRNA and generates an RNAi response. Delivery of siNA molecule expressing vectors can be systemic, such as by intravenous or intramuscular administration, by administration to target cells ex-planted from a subject followed by reintroduction into the subject, or by any other means that would allow for introduction into the desired target cell (for a review see Couture et al., 1996, TIG., 12, 510).

[0343] In one aspect the invention features an expression vector comprising a nucleic acid sequence encoding at least one siNA molecule of the instant invention. The expression vector can encode one or both strands of a siNA duplex, or a single self-complementary strand that self hybridizes into a siNA duplex. The nucleic acid sequences encoding the siNA molecules of the instant invention can be operably linked in a manner that allows expression of the siNA molecule (see for example Paul et al., 2002, Nature Biotechnology, 19, 505; Miyagishi and Taira, 2002, Nature Biotechnology, 19, 497; Lee et al., 2002, Nature Biotechnology, 19, 500; and Novina et al., 2002, Nature Medicine, advance online publication doi:10.1038/nm725).

[0344] In another aspect, the invention features an expression vector comprising: a) a transcription initiation region (e.g., eukaryotic pol I, II or III initiation region); b) a transcription termination region (e.g., eukaryotic pol I, II or III termination region); and c) a nucleic acid sequence encoding at least one of the siNA molecules of the instant invention, wherein said sequence is operably linked to said initiation region and said termination region in a manner that allows expression and/or delivery of the siNA molecule. The vector can optionally include an open reading frame (ORF) for a protein operably linked on the 5′ side or the 3′-side of the sequence encoding the siNA of the invention; and/or an intron (intervening sequences).

[0345] Transcription of the siNA molecule sequences can be driven from a promoter for eukaryotic RNA polymerase I (pol I), RNA polymerase II (pol II), or RNA polymerase III (pol III). Transcripts from pol II or pol III promoters are expressed at high levels in all cells; the levels of a given pol II promoter in a given cell type depends on the nature of the gene regulatory sequences (enhancers, silencers, etc.) present nearby. Prokaryotic RNA polymerase promoters are also used, providing that the prokaryotic RNA polymerase enzyme is expressed in the appropriate cells (Elroy-Stein and Moss, 1990, Proc. Natl. Acad. Sci. USA, 87, 6743-7; Gao and Huang 1993, Nucleic Acids Res., 21, 2867-72; Lieber et al., 1993, Methods Enzymol., 217, 47-66; Zhou et al., 1990, Mol. Cell. Biol., 10, 4529-37). Several investigators have demonstrated that nucleic acid molecules expressed from such promoters can function in mammalian cells (e.g. Kashani-Sabet et al., 1992, Antisense Res. Dev., 2, 3-15; Ojwang et al., 1992, Proc. Natl. Acad. Sci. USA, 89, 10802-6; Chen et al., 1992, Nucleic Acids Res., 20, 4581-9; Yu et al., 1993, Proc. Natl. Acad. Sci. USA, 90, 6340-4; L'Huillier et al., 1992, EMBO J, 11, 4411-8; Lisziewicz et al., 1993, Proc. Natl. Acad. Sci. U. S. A, 90, 8000-4; Thompson et al., 1995, Nucleic Acids Res., 23, 2259; Sullenger & Cech, 1993, Science, 262, 1566). More specifically, transcription units such as the ones derived from genes encoding U6 small nuclear (snRNA), transfer RNA (tRNA) and adenovirus VA RNA are useful in generating high concentrations of desired RNA molecules such as siNA in cells (Thompson et al., supra; Couture and Stinchcomb, 1996, supra; Noonberg et al. 1994, Nucleic Acid Res., 22, 2830; Noonberg et al., U.S. Pat. No. 5,624,803; Good et al., 1997, Gene Ther., 4, 45; Beigelman et al., International PCT Publication No. WO 96/18736. The above siNA transcription units can be incorporated into a variety of vectors for introduction into mammalian cells, including but not restricted to, plasmid DNA vectors, viral DNA vectors (such as adenovirus or adeno-associated virus vectors), or viral RNA vectors (such as retroviral or alphavirus vectors) (for a review see Couture and Stinchcomb, 1996, supra).

[0346] In another aspect the invention features an expression vector comprising a nucleic acid sequence encoding at least one of the siNA molecules of the invention in a manner that allows expression of that siNA molecule. The expression vector comprises in one embodiment; a) a transcription initiation region; b) a transcription termination region; and c) a nucleic acid sequence encoding at least one strand of the siNA molecule, wherein the sequence is operably linked to the initiation region and the termination region in a manner that allows expression and/or delivery of the siNA molecule.

[0347] In another embodiment the expression vector comprises: a) a transcription initiation region; b) a transcription termination region; c) an open reading frame; and d) a nucleic acid sequence encoding at least one strand of a siNA molecule, wherein the sequence is operably linked to the 3′-end of the open reading frame and wherein the sequence is operably linked to the initiation region, the open reading frame and the termination region in a manner that allows expression and/or delivery of the siNA molecule. In yet another embodiment, the expression vector comprises: a) a transcription initiation region; b) a transcription termination region; c) an intron; and d) a nucleic acid sequence encoding at least one siNA molecule, wherein the sequence is operably linked to the initiation region, the intron and the termination region in a manner which allows expression and/or delivery of the nucleic acid molecule.

[0348] In another embodiment, the expression vector comprises: a) a transcription initiation region; b) a transcription termination region; c) an intron; d) an open reading frame; and e) a nucleic acid sequence encoding at least one strand of a siNA molecule, wherein the sequence is operably linked to the 3′-end of the open reading frame and wherein the sequence is operably linked to the initiation region, the intron, the open reading frame and the termination region in a manner which allows expression and/or delivery of the siNA molecule.

[0349] SARS Virus Biology and Biochemistry

[0350] The following discussion is adapted from the report, “Preliminary Clinical Description of Severe Acute Respiratory Syndrome”, World Health Organization, Geneva, Switzerland, available at the Centers for Disease Control and Prevention website.

[0351] Severe acute respiratory syndrome (SARS) is a viral respiratory illness caused by a coronavirus, called SARS-associated coronavirus (SARS-CoV). SARS was first reported in Asia in February 2003. Over the next few months, the illness spread to more than two dozen countries in North America, South America, Europe, and Asia before the SARS global outbreak of 2003 was contained. According to the World Health Organization (WHO), a total of 8,098 people worldwide became sick with SARS during the 2003 outbreak. Of these, 774 died.

[0352] The incubation period for SARS is typically 2-7 days; however, isolated reports have suggested an incubation period as long as 10 days. The illness begins generally with a prodrome of fever (>100.4° F. [>38.0° C.]). Fever often is high, sometimes is associated with chills and rigors, and might be accompanied by other symptoms, including headache, malaise, and myalgia. At the onset of illness, some persons have mild respiratory symptoms. Typically, rash and neurologic or gastrointestinal findings are absent; however, some patients have reported diarrhea during the febrile prodrome.

[0353] After 3-7 days, a lower respiratory phase begins with the onset of a dry, nonproductive cough or dyspnea, which might be accompanied by or progress to hypoxemia. In 10%-20% of cases, the respiratory illness is severe enough to require intubation and mechanical ventilation. Death may result from progressive respiratory failure due to alveolar damage. The case-fatality rate among persons with illness meeting the current WHO case definition of SARS is approximately 3%.

[0354] Chest radiographs might be normal during the febrile prodrome and throughout the course of illness. However, in a substantial proportion of patients, the respiratory phase is characterized by early focal interstitial infiltrates progressing to more generalized, patchy, interstitial infiltrates. Some chest radiographs from patients in the late stages of SARS also have shown areas of consolidation.

[0355] Early in the course of disease, the absolute lymphocyte count is often decreased. Overall white blood cell counts have generally been normal or decreased. At the peak of the respiratory illness, approximately 50% of patients have leukopenia and thrombocytopenia or low-normal platelet counts (50,000-150,000/mL). Early in the respiratory phase, elevated creatine phosphokinase levels (as high as 3,000 IU/L) and hepatic transaminases (two to six times the upper limits of normal) have been noted. In the majority of patients, renal function has remained normal.

[0356] The severity of illness might be highly variable, ranging from mild illness to death. Although a few close contacts of patients with SARS have developed a similar illness, the majority have remained well. Some close contacts have reported a mild, febrile illness without respiratory signs or symptoms, suggesting the illness might not always progress to the respiratory phase.

[0357] Treatment regimens have included several antibiotics to presumptively treat known bacterial agents of atypical pneumonia. In several locations, therapy also has included antiviral agents such as oseltamivir or ribavirin. Steroids have also been administered orally or intravenously to patients in combination with ribavirin and other antimicrobials. At present, the most efficacious treatment regimen, if any, is unknown.

[0358] The causative agent of SARS appears to be a novel coronavirus that was isolated from patients who met the case definition of SARS (see Ksiazek et al., 2003, New England Journal of Medicine, 10.1056/NEJMoa030781. Indirect fluorescent antibody tests and enzyme-linked immunosorbent assays made with the new coronavirus isolate have been used to demonstrate a virus-specific serologic response. Amplification of short regions of the polymerase gene, (the most strongly conserved part of the Coronavirus genome) by reverse transcriptase polymerase chain reaction (RT-PCR) and nucleotide sequencing revealed that the SARS virus is a novel Coronavirus which has not previously been present in human populations. This conclusion is confirmed by serological (antigenic) investigations. The sequence of the SARS associated coronavirus was recently made available through the CDC.

[0359] Viral entry into cells occurs via endocytosis and membrane fusion. Replication occurs in the cytoplasm. Initially, the 5′ 20 kb of the (+)sense genome is translated to produce a viral polymerase, which then produces a full-length (−)sense strand. This is used as a template to produce mRNA as a nested set of transcripts, all with an identical 5′ non-translated leader sequence of 72 nt and coincident 3′ polyadenylated ends. Each mRNA is monocistronic, the genes at the 5′ end being translated from the longest mRNA. These unusual cytoplasmic structures are produced not by splicing but by the polymerase during transcription. Between each of the genes there is a repeated intergenic sequence—UCUAAAC—which interacts with the transcriptase plus cellular factors to splice the leader sequence onto the start of each ORF. Viral assembly occurs by budding into the golgi apparatus, and viral particles are transported to the surface of the cell and are subsequently released.

[0360] The SARS virus can be grown in Vero cells (a fibroblast cell line isolated in 1962 from a primate). This is a novel property for human cornaviruses which usually cannot be cultivated. In these cells, virus infection results in a cytopathic effect, and budding of Coronavirus-like particles from the endoplasmic reticulum within infected cells.

[0361] Detection of the SARS virus can be accomplished with serological testing and molecular diagnotic procedures. Serological testing for anti-Coronavirus antibodies consists of indirect fluorescent antibody testing and enzyme-linked immunosorbent assays (ELISA) which detect antibodies against the virus produced in response to infection. Molecular testing consists of reverse transcriptase-polymerase chain reaction (RT-PCR) tests specific for the RNA from the novel Coronavirus.

[0362] The use of small interfering nucleic acid molecules targeting SARS genes therefore provides a class of novel therapeutic agents that can be used in the treatment and diagnosis of SARS virus infection, acute respiratory failure, viral pneumonia, or any other disease or condition that responds to modulation of SARS genes.

### EXAMPLES

[0363] The following are non-limiting examples showing the selection, isolation, synthesis and activity of nucleic acids of the instant invention.

### Example 1

### Tandem Synthesis of siNA Constructs

[0364] Exemplary siNA molecules of the invention are synthesized in tandem using a cleavable linker, for example, a succinyl-based linker. Tandem synthesis as described herein is followed by a one-step purification process that provides RNAi molecules in high yield. This approach is highly amenable to siNA synthesis in support of high throughput RNAi screening, and can be readily adapted to multi-column or multi-well synthesis platforms.

[0365] After completing a tandem synthesis of a siNA oligo and its complement in which the 5′-terminal dimethoxytrityl (5′-O-DMT) group remains intact (trityl on synthesis), the oligonucleotides are deprotected as described above. Following deprotection, the siNA sequence strands are allowed to spontaneously hybridize. This hybridization yields a duplex in which one strand has retained the 5′-O-DMT group while the complementary strand comprises a terminal 5′-hydroxyl. The newly formed duplex behaves as a single molecule during routine solid-phase extraction purification (Trityl-On purification) even though only one molecule has a dimethoxytrityl group. Because the strands form a stable duplex, this dimethoxytrityl group (or an equivalent group, such as other trityl groups or other hydrophobic moieties) is all that is required to purify the pair of oligos, for example, by using a C18 cartridge.

[0366] Standard phosphoramidite synthesis chemistry is used up to the point of introducing a tandem linker, such as an inverted deoxy abasic succinate or glyceryl succinate linker (see FIG. 1) or an equivalent cleavable linker. A non-limiting example of linker coupling conditions that can be used includes a hindered base such as diisopropylethylamine (DIPA) and/or DMAP in the presence of an activator reagent such as Bromotripyrrolidinophosphoniumhexafluororophosphate (PyBrOP). After the linker is coupled, standard synthesis chemistry is utilized to complete synthesis of the second sequence leaving the terminal the 5′-O-DMT intact. Following synthesis, the resulting oligonucleotide is deprotected according to the procedures described herein and quenched with a suitable buffer, for example with 50 mM NaOAc or 1.5M NH₄H₂CO₃.

[0367] Purification of the siNA duplex can be readily accomplished using solid phase extraction, for example using a Waters Cl₈ SepPak 1 g cartridge conditioned with 1 column volume (CV) of acetonitrile, 2 CV H₂O, and 2 CV 50 mM NaOAc. The sample is loaded and then washed with 1 CV H₂O or 50 mM NaOAc. Failure sequences are eluted with 1 CV 14% ACN (Aqueous with 50 mM NaOAc and 50 mM NaCl). The column is then washed, for example with 1 CV H₂O followed by on-column detritylation, for example by passing 1 CV of 1% aqueous trifluoroacetic acid (TFA) over the column, then adding a second CV of 1% aqueous TFA to the column and allowing to stand for approximately 10 minutes. The remaining TFA solution is removed and the column washed with H20 followed by 1 CV 1M NaCl and additional H2O. The siNA duplex product is then eluted, for example, using 1 CV 20% aqueous CAN.

[0368] FIG. 2 provides an example of MALDI-TOF mass spectrometry analysis of a purified siNA construct in which each peak corresponds to the calculated mass of an individual siNA strand of the siNA duplex. The same purified siNA provides three peaks when analyzed by capillary gel electrophoresis (CGE), one peak presumably corresponding to the duplex siNA, and two peaks presumably corresponding to the separate siNA sequence strands. Ion exchange HPLC analysis of the same siNA contract only shows a single peak. Testing of the purified siNA construct using a luciferase reporter assay described below demonstrated the same RNAi activity compared to siNA constructs generated from separately synthesized oligonucleotide sequence strands.

### Example 2

### Identification of Potential siNA Target Sites in any RNA Sequence

[0369] The sequence of an RNA target of interest, such as a viral or human mRNA transcript, is screened for target sites, for example by using a computer folding algorithm. In a non-limiting example, the sequence of a gene or RNA gene transcript derived from a database, such as Genbank, is used to generate siNA targets having complementarity to the target. Such sequences can be obtained from a database, or can be determined experimentally as known in the art. Target sites that are known, for example, those target sites determined to be effective target sites based on studies with other nucleic acid molecules, for example ribozymes or antisense, or those targets known to be associated with a disease or condition such as those sites containing mutations or deletions, can be used to design siNA molecules targeting those sites. Various parameters can be used to determine which sites are the most suitable target sites within the target RNA sequence. These parameters include but are not limited to secondary or tertiary RNA structure, the nucleotide base composition of the target sequence, the degree of homology between various regions of the target sequence, or the relative position of the target sequence within the RNA transcript. Based on these determinations, any number of target sites within the RNA transcript can be chosen to screen siNA molecules for efficacy, for example by using in vitro RNA cleavage assays, cell culture, or animal models. In a non-limiting example, anywhere from 1 to 1000 target sites are chosen within the transcript based on the size of the siNA construct to be used. High throughput screening assays can be developed for screening siNA molecules using methods known in the art, such as with multi-well or multi-plate assays to determine efficient reduction in target gene expression.

### Example 3

### Selection of siNA Molecule Target Sites in a RNA

[0370] The following non-limiting steps can be used to carry out the selection of siNAs targeting a given gene sequence or transcript.
[0371] 1. The target sequence is parsed in silico into a list of all fragments or subsequences of a particular length, for example 23 nucleotide fragments, contained within the target sequence. This step is typically carried out using a custom Perl script, but commercial sequence analysis programs such as Oligo, MacVector, or the GCG Wisconsin Package can be employed as well.
[0372] 2. In some instances the siNAs correspond to more than one target sequence; such would be the case for example in targeting different transcripts of the same gene, targeting different transcripts of more than one gene, or for targeting both the human gene and an animal homolog. In this case, a subsequence list of a particular length is generated for each of the targets, and then the lists are compared to find matching sequences in each list. The subsequences are then ranked according to the number of target sequences that contain the given subsequence; the goal is to find subsequences that are present in most or all of the target sequences. Alternately, the ranking can identify subsequences that are unique to a target sequence, such as a mutant target sequence. Such an approach would enable the use of siNA to target specifically the mutant sequence and not effect the expression of the normal sequence.
[0373] 3. In some instances the siNA subsequences are absent in one or more sequences while present in the desired target sequence; such would be the case if the siNA targets a gene with a paralogous family member that is to remain untargeted. As in case 2 above, a subsequence list of a particular length is generated for each of the targets, and then the lists are compared to find sequences that are present in the target gene but are absent in the untargeted paralog.
[0374] 4. The ranked siNA subsequences can be further analyzed and ranked according to GC content. A preference can be given to sites containing 30-70% GC, with a further preference to sites containing 40-60% GC.
[0375] 5. The ranked siNA subsequences can be further analyzed and ranked according to self-folding and internal hairpins. Weaker internal folds are preferred; strong hairpin structures are to be avoided.
[0376] 6. The ranked siNA subsequences can be further analyzed and ranked according to whether they have runs of GGG or CCC in the sequence. GGG (or even more Gs) in either strand can make oligonucleotide synthesis problematic and can potentially interfere with RNAi activity, so it is avoided whenever better sequences are available. CCC is searched in the target strand because that will place GGG in the antisense strand.
[0377] 7. The ranked siNA subsequences can be further analyzed and ranked according to whether they have the dinucleotide WU (uridine dinucleotide) on the 3′-end of the sequence, and/or AA on the 5′-end of the sequence (to yield 3′ UU on the antisense sequence). These sequences allow one to design siNA molecules with terminal TT thymidine dinucleotides.
[0378] 8. Four or five target sites are chosen from the ranked list of subsequences as described above. For example, in subsequences having 23 nucleotides, the right 21 nucleotides of each chosen 23-mer subsequence are then designed and synthesized for the upper (sense) strand of the siNA duplex, while the reverse complement of the left 21 nucleotides of each chosen 23-mer subsequence are then designed and synthesized for the lower (antisense) strand of the siNA duplex (see Tables II and III). If terminal TT residues are desired for the sequence (as described in paragraph 7), then the two 3′ terminal nucleotides of both the sense and antisense strands are replaced by TT prior to synthesizing the oligos.
[0379] 9. The siNA molecules are screened in an in vitro, cell culture or animal model system to identify the most active siNA molecule or the most preferred target site within the target RNA sequence.
[0380] 10. Other design considerations can be used when selecting target nucleic acid sequences, see for example Reynolds et al., 2004, Nature Biotechnology Advanced Online Publication, Feb. 1, 2004, doi:10.1038/nbt936 and Ui-Tei et al., 2004, Nucleic Acids Research, 32, doi:10.1093/nar/gkh247.

[0381] In an alternate approach, a pool of siNA constructs specific to a SARS target sequence is used to screen for target sites in cells expressing SARS RNA, such as VERO cells and/or FRhk-4 cells. The general strategy used in this approach is shown in FIG. 9. A non-limiting example of such is a pool comprising sequences having SEQ ID NOs: 1-3392. Cells expressing SARS (e.g., VERO cells and/or FRhk-4 cells) are transfected with the pool of siNA constructs and cells that demonstrate a phenotype associated with SARS inhibition are sorted. The pool of siNA constructs can be expressed from transcription cassettes inserted into appropriate vectors (see for example FIG. 7 and FIG. 8). The siNA from cells demonstrating a positive phenotypic change (e.g., decreased proliferation, decreased SARS mRNA levels or decreased SARS protein expression), are sequenced to determine the most suitable target site(s) within the target SARS RNA sequence.

### Example 4

### SARS Targeted siNA Design

[0382] siNA target sites were chosen by analyzing sequences of the SARS RNA target and optionally prioritizing the target sites on the basis of folding (structure of any given sequence analyzed to determine siNA accessibility to the target), by using a library of siNA molecules as described in Example 3, or alternately by using an in vitro siNA system as described in Example 6 herein. siNA molecules were designed that could bind each target and are optionally individually analyzed by computer folding to assess whether the siNA molecule can interact with the target sequence. Varying the length of the siNA molecules can be chosen to optimize activity. Generally, a sufficient number of complementary nucleotide bases are chosen to bind to, or otherwise interact with, the target RNA, but the degree of complementarity can be modulated to accommodate siNA duplexes or varying length or base composition. By using such methodologies, siNA molecules can be designed to target sites within any known RNA sequence, for example those RNA sequences corresponding to the any gene transcript.

[0383] Chemically modified siNA constructs are designed to provide nuclease stability for systemic administration in vivo and/or improved pharmacokinetic, localization, and delivery properties while preserving the ability to mediate RNAi activity. Chemical modifications as described herein are introduced synthetically using synthetic methods described herein and those generally known in the art. The synthetic siNA constructs are then assayed for nuclease stability in serum and/or cellular/tissue extracts (e.g. liver extracts). The synthetic siNA constructs are also tested in parallel for RNAi activity using an appropriate assay, such as a luciferase reporter assay as described herein or another suitable assay that can quantity RNAi activity. Synthetic siNA constructs that possess both nuclease stability and RNAi activity can be further modified and re-evaluated in stability and activity assays. The chemical modifications of the stabilized active siNA constructs can then be applied to any siNA sequence targeting any chosen RNA and used, for example, in target screening assays to pick lead siNA compounds for therapeutic development (see for example FIG. 11).

### Example 5

### Chemical Synthesis and Purification of siNA

[0384] siNA molecules can be designed to interact with various sites in the RNA message, for example, target sequences within the RNA sequences described herein. The sequence of one strand of the siNA molecule(s) is complementary to the target site sequences described above. The siNA molecules can be chemically synthesized using methods described herein. Inactive siNA molecules that are used as control sequences can be synthesized by scrambling the sequence of the siNA molecules such that it is not complementary to the target sequence. Generally, siNA constructs can by synthesized using solid phase oligonucleotide synthesis methods as described herein (see for example Usman et al., U.S. Pat. Nos. 5,804,683; 5,831,071; 5,998,203; 6,117,657; 6,353,098; 6,362,323; 6,437,117; 6,469,158; Scaringe et al., U.S. Pat. Nos. 6,111,086; 6,008,400; 6,111,086 all incorporated by reference herein in their entirety).

[0385] In a non-limiting example, RNA oligonucleotides are synthesized in a stepwise fashion using the phosphoramidite chemistry as is known in the art. Standard phosphoramidite chemistry involves the use of nucleosides comprising any of 5′-O-dimethoxytrityl, 2′-O-tert-butyldimethylsilyl, 3′-O-2-Cyanoethyl N,N-diisopropylphosphoroamidite groups, and exocyclic amine protecting groups (e.g. N6-benzoyl adenosine, N4 acetyl cytidine, and N2-isobutyryl guanosine). Alternately, 2′-O—Silyl Ethers can be used in conjunction with acid-labile 2′-O-orthoester protecting groups in the synthesis of RNA as described by Scaringe supra. Differing 2′ chemistries can require different protecting groups, for example 2′-deoxy-2′-amino nucleosides can utilize N-phthaloyl protection as described by Usman et al., U.S. Pat. No. 5,631,360, incorporated by reference herein in its entirety).

[0386] During solid phase synthesis, each nucleotide is added sequentially (3′- to 5′-direction) to the solid support-bound oligonucleotide. The first nucleoside at the 3′-end of the chain is covalently attached to a solid support (e.g., controlled pore glass or polystyrene) using various linkers. The nucleotide precursor, a ribonucleoside phosphoramidite, and activator are combined resulting in the coupling of the second nucleoside phosphoramidite onto the 5′-end of the first nucleoside. The support is then washed and any unreacted 5′-hydroxyl groups are capped with a capping reagent such as acetic anhydride to yield inactive 5′-acetyl moieties. The trivalent phosphorus linkage is then oxidized to a more stable phosphate linkage. At the end of the nucleotide addition cycle, the 5′-O-protecting group is cleaved under suitable conditions (e.g., acidic conditions for trityl-based groups and Fluoride for silyl-based groups). The cycle is repeated for each subsequent nucleotide.

[0387] Modification of synthesis conditions can be used to optimize coupling efficiency, for example by using differing coupling times, differing reagent/phosphoramidite concentrations, differing contact times, differing solid supports and solid support linker chemistries depending on the particular chemical composition of the siNA to be synthesized. Deprotection and purification of the siNA can be performed as is generally described in Deprotection and purification of the siNA can be performed as is generally described in Usman et al., U.S. Pat. No. 5,831,071, U.S. Pat. No. 6,353,098, U.S. Pat. No. 6,437,117, and Bellon et al., U.S. Pat. No. 6,054,576, U.S. Pat. No. 6,162,909, U.S. Pat. No. 6,303,773, or Scaringe supra, incorporated by reference herein in their entireties. Additionally, deprotection conditions can be modified to provide the best possible yield and purity of siNA constructs. For example, applicant has observed that oligonucleotides comprising 2′-deoxy-2′-fluoro nucleotides can degrade under inappropriate deprotection conditions. Such oligonucleotides are deprotected using aqueous methylamine at about 35° C. for 30 minutes. If the 2′-deoxy-2′-fluoro containing oligonucleotide also comprises ribonucleotides, after deprotection with aqueous methylamine at about 35° C. for 30 minutes, TEA-HF is added and the reaction maintained at about 65° C. for an additional 15 minutes.

### Example 6

### RNAi In Vitro Assay to Assess siNA Activity

[0388] An in vitro assay that recapitulates RNAi in a cell-free system is used to evaluate siNA constructs targeting SARS RNA targets. The assay comprises the system described by Tuschl et al., 1999, Genes and Development, 13, 3191-3197 and Zamore et al., 2000, Cell, 101, 25-33 adapted for use with SARS target RNA. A Drosophila extract derived from syncytial blastoderm is used to reconstitute RNAi activity in vitro. Target RNA is generated via in vitro transcription from an appropriate SARS expressing plasmid using T7 RNA polymerase or via chemical synthesis as described herein. Sense and antisense siNA strands (for example 20 uM each) are annealed by incubation in buffer (such as 100 mM potassium acetate, 30 mM HEPES-KOH, pH 7.4, 2 mM magnesium acetate) for 1 minute at 90° C. followed by 1 hour at 37° C., then diluted in lysis buffer (for example 100 mM potassium acetate, 30 mM HEPES-KOH at pH 7.4, 2 mM magnesium acetate). Annealing can be monitored by gel electrophoresis on an agarose gel in TBE buffer and stained with ethidium bromide. The Drosophila lysate is prepared using zero to two-hour-old embryos from Oregon R flies collected on yeasted molasses agar that are dechorionated and lysed. The lysate is centrifuged and the supernatant isolated. The assay comprises a reaction mixture containing 50% lysate [vol/vol], RNA (10-50 μM final concentration), and 10% [vol/vol] lysis buffer containing siNA (10 nM final concentration). The reaction mixture also contains 10 mM creatine phosphate, 10 ug.ml creatine phosphokinase, 100 um GTP, 100 uM UTP, 100 uM CTP, 500 uM ATP, 5 mM DTT, 0.1 U/uL RNasin (Promega), and 100 uM of each amino acid. The final concentration of potassium acetate is adjusted to 100 mM. The reactions are pre-assembled on ice and preincubated at 25° C. for 10 minutes before adding RNA, then incubated at 25° C. for an additional 60 minutes. Reactions are quenched with 4 volumes of 1.25×Passive Lysis Buffer (Promega). Target RNA cleavage is assayed by RT-PCR analysis or other methods known in the art and are compared to control reactions in which siNA is omitted from the reaction.

[0389] Alternately, internally-labeled target RNA for the assay is prepared by in vitro transcription in the presence of [alpha-³²P] CTP, passed over a G 50 Sephadex column by spin chromatography and used as target RNA without further purification. Optionally, target RNA is 5′-³²P-end labeled using T4 polynucleotide kinase enzyme. Assays are performed as described above and target RNA and the specific RNA cleavage products generated by RNAi are visualized on an autoradiograph of a gel. The percentage of cleavage is determined by PHOSPHOR IMAGER® (autoradiography) quantitation of bands representing intact control RNA or RNA from control reactions without siNA and the cleavage products generated by the assay.

[0390] In one embodiment, this assay is used to determine target sites the SARS RNA target for siNA mediated RNAi cleavage, wherein a plurality of siNA constructs are screened for RNAi mediated cleavage of the SARS RNA target, for example, by analyzing the assay reaction by electrophoresis of labeled target RNA, or by northern blotting, as well as by other methodology well known in the art.

### Example 7

### Nucleic Acid Inhibition of SARS Target RNA In Vitro

[0391] siNA molecules targeted to the human SARS RNA are designed and synthesized as described above: These nucleic acid molecules can be tested for cleavage activity in vivo, for example, using the following procedure. The target sequences and the nucleotide location within the SARS RNA are given in Table II and III.

[0392] Two formats are used to test the efficacy of siNAs targeting SARS. First, the reagents are tested in cell culture using, for example, VERO cells and/or FRhk-4 cells, to determine the extent of RNA and protein inhibition. siNA reagents (e.g.; see Tables I and III) are selected against the SARS target as described herein. RNA inhibition is measured after delivery of these reagents by a suitable transfection agent to, for example, VERO cells and/or FRhk-4 cells. Relative amounts of target RNA are measured versus actin using real-time PCR monitoring of amplification (e.g., ABI 7700 TAQMAN®). A comparison is made to a mixture of oligonucleotide sequences made to unrelated targets or to a randomized siNA control with the same overall length and chemistry, but randomly substituted at each position. Primary and secondary lead reagents are chosen for the target and optimization performed. After an optimal transfection agent concentration is chosen, a RNA time-course of inhibition is performed with the lead siNA molecule. In addition, a cell-plating format can be used to determine RNA inhibition.

Delivery of siNA to Cells

[0393] Cells (e.g., VERO cells and/or FRhk-4 cells infected with the SARS virus) are seeded, for example, at 1×10⁵ cells per well of a six-well dish in EGM-2 (BioWhittaker) the day before transfection. siNA (final concentration, for example 20 nM) and cationic lipid (e.g., final concentration 2 μg/ml) are complexed in EGM basal media (Bio Whittaker) at 37° C. for 30 minutes in polystyrene tubes. Following vortexing, the complexed siNA is added to each well and incubated for the times indicated. For initial optimization experiments, cells are seeded, for example, at 1×10³ in 96 well plates and siNA complex added as described. Efficiency of delivery of siNA to cells is determined using a fluorescent siNA complexed with lipid. Cells in 6-well dishes are incubated with siNA for 24 hours, rinsed with PBS and fixed in 2% paraformaldehyde for 15 minutes at room temperature. Uptake of siNA is visualized using a fluorescent microscope.

TAQMAN® (Real-Time PCR Monitoring of Amplification) and Lightcycler Quantification of mRNA

[0394] Total RNA is prepared from cells following siNA delivery, for example, using Qiagen RNA purification kits for 6-well or Rneasy extraction kits for 96-well assays. For TAQMAN® analysis (real-time PCR monitoring of amplification), dual-labeled probes are synthesized with the reporter dye, FAM or JOE, covalently linked at the 5′-end and the quencher dye TAMRA conjugated to the 3′-end. One-step RT-PCR amplifications are performed on, for example, an ABI PRISM 7700 Sequence Detector using 50 μl reactions consisting of 10 μl total RNA, 100 nM forward primer, 900 nM reverse primer, 100 nM probe, 1X TAQMAN® PCR reaction buffer (PE-Applied Biosystems), 5.5 mM MgClz, 300 μM each dATP, dCTP, dGTP, and dTTP, IOU RNase Inhibitor (Promega), 1.25 U AMPLITAQ GOLD® (DNA polymerase) (PE-Applied Biosystems) and IOU M-MLV Reverse Transcriptase (Promega). The thermal cycling conditions can consist of 30 minutes at 48° C., 10 minutes at 95° C., followed by 40 cycles of 15 seconds at 95° C. and 1 minute at 60° C. Quantitation of mRNA levels is determined relative to standards generated from serially diluted total cellular RNA (300, 100, 33, 11 ng/r×n) and normalizing to B-actin or GAPDH mRNA in parallel TAQMAN® reactions (real-time PCR monitoring of amplification). For each gene of interest an upper and lower primer and a fluorescently labeled probe are designed. Real time incorporation of SYBR Green I dye into a specific PCR product can be measured in glass capillary tubes using a lightcyler. A standard curve is generated for each primer pair using control cRNA. Values are represented as relative expression to GAPDH in each sample.

Western Blotting

[0395] Nuclear extracts can be prepared using a standard micro preparation technique (see for example Andrews and Faller, 1991, Nucleic Acids Research, 19, 2499). Protein extracts from supernatants are prepared, for example using TCA precipitation. An equal volume of 20% TCA is added to the cell supernatant, incubated on ice for 1 hour and pelleted by centrifugation for 5 minutes. Pellets are washed in acetone, dried and resuspended in water. Cellular protein extracts are run on a 10% Bis-Tris NuPage (nuclear extracts) or 4-12% Tris-Glycine (supernatant extracts) polyacrylamide gel and transferred onto nitro-cellulose membranes. Non-specific binding can be blocked by incubation, for example, with 5% non-fat milk for 1 hour followed by primary antibody for 16 hour at 4° C. Following washes, the secondary antibody is applied, for example (1:10,000 dilution) for 1 hour at room temperature and the signal detected with SuperSignal reagent (Pierce).

### Example 8

### RNAi Mediated Inhibition of SARS RNA Expression

[0396] siNA constructs (e.g., siNA constructs shown in Table III) are tested for efficacy in reducing SARS RNA expression in, for example, VERO cells and/or FRhk-4 cells. Cells are plated approximately 24 h before transfection in 96-well plates at 5,000-7,500 cells/well, 100 μl/well, such that at the time of transfection cells are 70-90% confluent. For transfection, annealed siNAs are mixed with the transfection reagent (Lipofectamine 2000, Invitrogen) in a volume of 50 μl/well and incubated for 20 minutes at room temperature. The siNA transfection mixtures are added to cells to give a final siNA concentration of 25 nM in a volume of 150 μl. Each siNA transfection mixture is added to 3 wells for triplicate siNA treatments. Cells are incubated at 37° for 24 h in the continued presence of the siNA transfection mixture. At 24 h, RNA is prepared from each well of treated cells. The supernatants with the transfection mixtures are first removed and discarded, then the cells are lysed and RNA prepared from each well. Target gene expression following treatment is evaluated by RT-PCR for the target gene and for a control gene (36B4, an RNA polymerase subunit) for normalization. The triplicate data is averaged and the standard deviations determined for each treatment. Normalized data are graphed and the percent reduction of target mRNA by active siNAs in comparison to their respective inverted control siNAs is determined.

[0397] In a non-limiting example, a siNA construct comprising ribonucleotides and 3′-terminal dithymidine caps is assayed along with a chemically modified siNA construct comprising 2′-deoxy-2′-fluoro pyrimidine nucleotides and purine ribonucleotides in which the sense strand of the siNA is further modified with 5′ and 3′-terminal inverted deoxyabasic caps and the antisense strand comprises a 3′-terminal phosphorothioate internucleotide linkage. Additional stabilization chemistries as described in Table IV are similarly assayed for activity. These siNA constructs are compared to appropriate matched chemistry inverted controls. In addition, the siNA constructs are also compared to untreated cells, cells transfected with lipid and scrambled siNA constructs, and cells transfected with lipid alone (transfection control).

### Example 9

### Animal Models

[0398] Evaluating the efficacy of anti-SARS agents in animal models is an important prerequisite to human clinical trials. Byron et al., 2003, Nature, 425, 915, describe ferret and feline animal models of SARS virus infection. Haagmans et al., 2004, Nature Medicine, 10, 290-293, describe the use of pegylated interferon-alpha in protecting type 1 pneumocytes against SARS coronavirus infection in macaques. Gao et al., 2003, Lancet, 362, 1895-6, describe the use of a SARS virus vaccine in monkeys. All of these models can be adapted for use for pre-clinical evaluation of the efficacy of nucleic acid compositions of the invention in modulating SARS virus gene expression toward therapeutic use.

### Example 10

### Indications

[0399] The present body of knowledge in SARS research indicates the need for methods to assay SARS activity and for compounds that can regulate SARS expression for research, diagnostic, and therapeutic use. As described herein, the nucleic acid molecules of the present invention can be used in assays to diagnose disease state related of SARS levels. In addition, the nucleic acid molecules can be used to treat disease state related to SARS levels.

[0400] Particular degenerative and disease states that can be associated with SARS expression modulation include, but are not limited to, SARS virus infection, liver failure, hepatocellular carcinoma, cirrhosis, and/or other disease states associated with SARS virus infection.

[0401] Immunomodulators, steroids, and anti-viral compounds are non-limiting examples of pharmaceutical agents that can be combined with or used in conjunction with the nucleic acid molecules (e.g. siNA molecules) of the instant invention. The use of ribavirin and oseltamivir are non-limiting examples of chemotherapeutic agents that can be combined with or used in conjunction with the nucleic acid molecules (e.g. siNA molecules) of the instant invention. Those skilled in the art will recognize that other anti-cancer compounds and therapies can similarly be readily combined with the nucleic acid molecules of the instant invention (e.g. siNA molecules) and are hence within the scope of the instant invention.

### Example 11

### Interferons

[0402] Interferons represent a non-limiting example of a class of compounds that can be used in conjunction with the siNA molecules of the invention for treating the diseases and/or conditions described herein. Type I interferons (IFN) are a class of natural cytokines that includes a family of greater than 25 IFN-α (Pesta, 1986, Methods Enzymol. 119, 3-14) as well as IFN-β, and IFN-ω. Although evolutionarily derived from the same gene (Diaz et al., 1994, Genomics 22, 540-552), there are many differences in the primary sequence of these molecules, implying an evolutionary divergence in biologic activity. All type I IFN share a common pattern of biologic effects that begin with binding of the IFN to the cell surface receptor (Pfeffer & Strulovici, 1992, Transmembrane secondary messengers for IFN-α/β. In: Interferon. Principles and Medical Applications., S. Baron, D. H. Coopenhaver, F. Dianzani, W. R. Fleischmann Jr., T. K. Hughes Jr., G. R. Kimpel, D. W. Niesel, G. J. Stanton, and S. K. Tyring, eds. 151-160). Binding is followed by activation of tyrosine kinases, including the Janus tyrosine kinases and the STAT proteins, which leads to the production of several IFN-stimulated gene products (Johnson et al., 1994, Sci. Am. 270, 68-75). The IFN-stimulated gene products are responsible for the pleotropic biologic effects of type I IFN, including antiviral, antiproliferative, and immunomodulatory effects, cytokine induction, and HLA class I and class II regulation (Pestka et al., 1987, Annu. Rev. Biochem 56, 727). Examples of IFN-stimulated gene products include 2-5-oligoadenylate synthetase (2-5 OAS), β₂-microglobulin, neopterin, p68 kinases, and the Mx protein (Chebath & Revel, 1992, The 2-5 A system: 2-5 A synthetase, isospecies and functions. In: Interferon. Principles and Medical Applications, S. Baron, D. H. Coopenhaver, F. Dianzani, W. R. Jr. Fleischmann, T. K. Jr Hughes, G. R. Kimpel, D. W. Niesel, G. J. Stanton, and S. K. Tyring, eds., pp. 225-236; Samuel, 1992, The RNA-dependent P1/eIF-2α protein kinase. In: Interferon. Principles and Medical Applications. S. Baron, D. H. Coopenhaver, F. Dianzani, W. R. Fleischmann Jr., T. K. Hughes Jr., G. R. Kimpel, D. W. Niesel, G. H. Stanton, and S. K. Tyring, eds. 237-250; Horisberger, 1992, MX protein: function and Mechanism of Action. In: Interferon. Principles and Medical Applications. S. Baron, D. H. Coopenhaver, F. Dianzani, W. R. Fleischmann Jr., T. K. Hughes Jr., G. R. Kimpel, D. W. Niesel, G. H. Stanton, and S. K. Tyring, eds. 215-224). Although all type I IFN have similar biologic effects, not all the activities are shared by each type I IFN, and in many cases, the extent of activity varies quite substantially for each IFN subtype (Fish et al, 1989, J. Interferon Res. 9, 97-114; Ozes et al., 1992, J. Interferon Res. 12, 55-59). More specifically, investigations into the properties of different subtypes of IFN-α and molecular hybrids of IFN-α have shown differences in pharmacologic properties (Rubinstein, 1987, J. Interferon Res. 7, 545-551). These pharmacologic differences can arise from as few as three amino acid residue changes (Lee et al., 1982, Cancer Res. 42, 1312-1316).

[0403] Eighty-five to 166 amino acids are conserved in the known IFN-α subtypes. Excluding the IFN-α pseudogenes, there are approximately 25 known distinct IFN-α subtypes. Pairwise comparisons of these nonallelic subtypes show primary sequence differences ranging from 2% to 23%. In addition to the naturally occurring IFNs, a non-natural recombinant type I interferon known as consensus interferon (CIFN) has been synthesized as a therapeutic compound (Tong et al., 1997, Hepatology 26, 747-754).

[0404] Interferon is currently in use for at least 12 different indications, including infectious and autoimmune diseases and cancer (Borden, 1992, N. Engl. J. Med. 326, 1491-1492). For autoimmune diseases, IFN has been utilized for treatment of rheumatoid arthritis, multiple sclerosis, and Crohn's disease. For treatment of cancer, IFN has been used alone or in combination with a number of different compounds. Specific types of cancers for which IFN has been used include squamous cell carcinomas, melanomas, hypernephromas, hemangiomas, hairy cell leukemia, and Kaposi's sarcoma. In the treatment of infectious diseases, IFNs increase the phagocytic activity of macrophages and cytotoxicity of lymphocytes and inhibits the propagation of cellular pathogens. Specific indications for which IFN has been used as treatment include hepatitis B, human papillomavirus types 6 and 11 (i.e. genital warts) (Leventhal et al., 1991, N Engl J. Med 325, 613-617), chronic granulomatous disease, and SARS virus.

[0405] Pegylated interferons, i.e., interferons conjugated with polyethylene glycol (PEG), have demonstrated improved characteristics over interferon. Advantages incurred by PEG conjugation can include an improved pharmacokinetic profile compared to interferons lacking PEG, thus imparting more convenient dosing regimes, improved tolerance, and improved antiviral efficacy. Such improvements have been demonstrated in clinical studies of both polyethylene glycol interferon alfa-2a (PEGASYS, Roche) and polyethylene glycol interferon alfa-2b (VIRAFERON PEG, PEG-INTRON, Enzon/Schering Plough).

[0406] siNA molecules in combination with interferons and polyethylene glycol interferons have the potential to improve the effectiveness of treatment of SARS or any of the other indications discussed above. siNA molecules targeting RNAs associated with SARS virus infection can be used individually or in combination with other therapies such as interferons and polyethylene glycol interferons and to achieve enhanced efficacy.

### Example 12

### Diagnostic Uses

[0407] The siNA molecules of the invention can be used in a variety of diagnostic applications, such as in the identification of molecular targets (e.g., RNA) in a variety of applications, for example, in clinical, industrial, environmental, agricultural and/or research settings. Such diagnostic use of siNA molecules involves utilizing reconstituted RNAi systems, for example, using cellular lysates or partially purified cellular lysates. siNA molecules of this invention can be used as diagnostic tools to examine genetic drift and mutations within diseased cells or to detect the presence of endogenous or exogenous, for example viral, RNA in a cell. The close relationship between siNA activity and the structure of the target RNA allows the detection of mutations in any region of the molecule, which alters the base-pairing and three-dimensional structure of the target RNA. By using multiple siNA molecules described in this invention, one can map nucleotide changes, which are important to RNA structure and function in vitro, as well as in cells and tissues. Cleavage of target RNAs with siNA molecules can be used to inhibit gene expression and define the role of specified gene products in the progression of disease or infection. In this manner, other genetic targets can be defined as important mediators of the disease. These experiments will lead to better treatment of the disease progression by affording the possibility of combination therapies (e.g., multiple siNA molecules targeted to different genes, siNA molecules coupled with known small molecule inhibitors, or intermittent treatment with combinations siNA molecules and/or other chemical or biological molecules). Other in vitro uses of siNA molecules of this invention are well known in the art, and include detection of the presence of mRNAs associated with a disease, infection, or related condition. Such RNA is detected by determining the presence of a cleavage product after treatment with a siNA using standard methodologies, for example, fluorescence resonance emission transfer (FRET).

[0408] In a specific example, siNA molecules that cleave only wild-type or mutant forms of the target RNA are used for the assay. The first siNA molecules (i.e., those that cleave only wild-type forms of target RNA) are used to identify wild-type RNA present in the sample and the second siNA molecules (i.e., those that cleave only mutant forms of target RNA) are used to identify mutant RNA in the sample. As reaction controls, synthetic substrates of both wild-type and mutant RNA are cleaved by both siNA molecules to demonstrate the relative siNA efficiencies in the reactions and the absence of cleavage of the “non-targeted” RNA species. The cleavage products from the synthetic substrates also serve to generate size markers for the analysis of wild-type and mutant RNAs in the sample population. Thus, each analysis requires two siNA molecules, two substrates and one unknown sample, which is combined into six reactions. The presence of cleavage products is determined using an RNase protection assay so that full-length and cleavage fragments of each RNA can be analyzed in one lane of a polyacrylamide gel. It is not absolutely required to quantify the results to gain insight into the expression of mutant RNAs and putative risk of the desired phenotypic changes in target cells. The expression of mRNA whose protein product is implicated in the development of the phenotype (i.e., disease related or infection related) is adequate to establish risk. If probes of comparable specific activity are used for both transcripts, then a qualitative comparison of RNA levels is adequate and decreases the cost of the initial diagnosis. Higher mutant form to wild-type ratios are correlated with higher risk whether RNA levels are compared qualitatively or quantitatively.

[0409] All patents and publications mentioned in the specification are indicative of the levels of skill of those skilled in the art to which the invention pertains. All references cited in this disclosure are incorporated by reference to the same extent as if each reference had been incorporated by reference in its entirety individually.

[0410] One skilled in the art would readily appreciate that the present invention is well adapted to carry out the objects and obtain the ends and advantages mentioned, as well as those inherent therein. The methods and compositions described herein as presently representative of preferred embodiments are exemplary and are not intended as limitations on the scope of the invention. Changes therein and other uses will occur to those skilled in the art, which are encompassed within the spirit of the invention, are defined by the scope of the claims.

[0411] It will be readily apparent to one skilled in the art that varying substitutions and modifications can be made to the invention disclosed herein without departing from the scope and spirit of the invention. Thus, such additional embodiments are within the scope of the present invention and the following claims. The present invention teaches one skilled in the art to test various combinations and/or substitutions of chemical modifications described herein toward generating nucleic acid constructs with improved activity for mediating RNAi activity. Such improved activity can comprise improved stability, improved bioavailability, and/or improved activation of cellular responses mediating RNAi. Therefore, the specific embodiments described herein are not limiting and one skilled in the art can readily appreciate that specific combinations of the modifications described herein can be tested without undue experimentation toward identifying siNA molecules with improved RNAi activity.

[0412] The invention illustratively described herein suitably can be practiced in the absence of any element or elements, limitation or limitations that are not specifically disclosed herein. Thus, for example, in each instance herein any of the terms “comprising”, “consisting essentially of”, and “consisting of” may be replaced with either of the other two terms. The terms and expressions which have been employed are used as terms of description and not of limitation, and there is no intention that in the use of such terms and expressions of excluding any equivalents of the features shown and described or portions thereof, but it is recognized that various modifications are possible within the scope of the invention claimed. Thus, it should be understood that although the present invention has been specifically disclosed by preferred embodiments, optional features, modification and variation of the concepts herein disclosed may be resorted to by those skilled in the art, and that such modifications and variations are considered to be within the scope of this invention as defined by the description and the appended claims. In addition, where features or aspects of the invention are described in terms of Markush groups or other grouping of alternatives, those skilled in the art will recognize that the invention is also thereby described in terms of any individual member or subgroup of members of the Markush group or other group.

TABLE I
SARS virus Accession Numbers

LOCUS NC_004718 29736 bp ss-RNA linear VRL
15-APR-2003
DEFINITION SARS coronavirus, complete genome.
ACCESSION NC_004718

[0413] TABLE II

SARS siNA and Target Sequences
SARS CoV NC_004718

| | | | | | | | | |
|---|---|---|---|---|---|---|---|---|
| Pos | Seq | Seq ID | UPos | Upper seq | Seq ID | LPos | Lower seq | Seq ID |

| 3 | ACCCAGGAAAAGCCAACCA | 1 | 3 | ACCCAGGAAAAGCCAACCA | 1 | 21 | UGGUUGGCUUUUCCUGGGU | 1652 |
|---|---|---|---|---|---|---|---|---|
| 21 | AACCUCGAUCUCUUGUAGA | 2 | 21 | AACCUCGAUCUCUUGUAGA | 2 | 39 | UCUACAAGAGAUCGAGGUU | 1653 |
| 39 | AUCUGUUCUCUAAACGAAC | 3 | 39 | AUCUGUUCUCUAAACGAAC | 3 | 57 | GUUCGUUUAGAGAACAGAU | 1654 |
| 57 | CUUUAAAAUCUGUGUAGCU | 4 | 57 | CUUUAAAAUCUGUGUAGCU | 4 | 75 | AGCUACACAGAUUUUAAAG | 1655 |
| 75 | UGUCGCUCGGCUGCAUGCC | 5 | 75 | UGUCGCUCGGCUGCAUGCC | 5 | 93 | GGCAUGCAGCCGAGCGACA | 1656 |
| 93 | CUAGUGCACCUACGCAGUA | 6 | 93 | CUAGUGCACCUACGCAGUA | 6 | 111 | UACUGCGUAGGUGCACUAG | 1657 |
| 111 | AUAAACAAUAAUAAAUUUU | 7 | 111 | AUAAACAAUAAUAAAUUUU | 7 | 129 | AAAAUUUAUUAUUGUUUAU | 1658 |
| 129 | UACUGUCGUUGACAAGAAA | 8 | 129 | UACUGUCGUUGACAAGAAA | 8 | 147 | UUUCUUGUCAACGACAGUA | 1659 |
| 147 | ACGAGUAACUCGUCCCUCU | 9 | 147 | ACGAGUAACUCGUCCCUCU | 9 | 165 | AGAGGGACGAGUUACUCGU | 1660 |
| 165 | UUCUGCAGACUGCUUACGG | 10 | 165 | UUCUGCAGACUGCUUACGG | 10 | 183 | CCGUAAGCAGUCUGCAGAA | 1661 |
| 183 | GUUUCGUCCGUGUUGCAGU | 11 | 183 | GUUUCGUCCGUGUUGCAGU | 11 | 201 | ACUGCAACACGGACGAAAC | 1662 |
| 201 | UCGAUCAUCAGCAUACCUA | 12 | 201 | UCGAUCAUCAGCAUACCUA | 12 | 219 | UAGGUAUGCUGAUGAUCGA | 1663 |
| 219 | AGGUUUCGUCCGGGUGUGA | 13 | 219 | AGGUUUCGUCCGGGUGUGA | 13 | 237 | UCACACCCGGACGAAACCU | 1664 |
| 237 | ACCGAAAGGUAAGAUGGAG | 14 | 237 | ACCGAAAGGUAAGAUGGAG | 14 | 255 | CUCCAUCUUACCUUUCGGU | 1665 |
| 255 | GAGCCUUGUUCUUGGUGUC | 15 | 255 | GAGCCUUGUUCUUGGUGUC | 15 | 273 | GACACCAAGAACAAGGCUC | 1666 |
| 273 | CAACGAGAAAACACACGUC | 16 | 273 | CAACGAGAAAACACACGUC | 16 | 291 | GACGUGUGUUUUCUCGUUG | 1667 |
| 291 | CCAACUCAGUUUGCCUGUC | 17 | 291 | CCAACUCAGUUUGCCUGUC | 17 | 309 | GACAGGCAAACUGAGUUGG | 1668 |
| 309 | CCUUCAGGUUAGAGACGUG | 18 | 309 | CCUUCAGGUUAGAGACGUG | 18 | 327 | CACGUCUCUAACCUGAAGG | 1669 |
| 327 | GCUAGUGCGUGGCUUCGGG | 19 | 327 | GCUAGUGCGUGGCUUCGGG | 19 | 345 | CCCGAAGCCACGCACUAGC | 1670 |
| 345 | GGACUCUGUGGAAGAGGCC | 20 | 345 | GGACUCUGUGGAAGAGGCC | 20 | 363 | GGCCUCUUCCACAGAGUCC | 1671 |
| 363 | CCUAUCGGAGGCACGUGAA | 21 | 363 | CCUAUCGGAGGCACGUGAA | 21 | 381 | UUCACGUGCCUCCGAUAGG | 1672 |
| 381 | ACACCUCAAAAAUGGCACU | 22 | 381 | ACACCUCAAAAAUGGCACU | 22 | 399 | AGUGCCAUUUUUGAGGUGU | 1673 |
| 399 | UUGUGGUCUAGUAGAGCUG | 23 | 399 | UUGUGGUCUAGUAGAGCUG | 23 | 417 | CAGCUCUACUAGACCACAA | 1674 |
| 417 | GGAAAAAGGCGUACUGCCC | 24 | 417 | GGAAAAAGGCGUACUGCCC | 24 | 435 | GGGCAGUACGCCUUUUUCC | 1675 |
| 435 | CCAGCUUGAACAGCCCUAU | 25 | 435 | CCAGCUUGAACAGCCCUAU | 25 | 453 | AUAGGGCUGUUCAAGCUGG | 1676 |
| 453 | UGUGUUCAUUAAACGUUCU | 26 | 453 | UGUGUUCAUUAAACGUUCU | 26 | 471 | AGAACGUUUAAUGAACACA | 1677 |
| 471 | UGAUGCCUUAAGCACCAAU | 27 | 471 | UGAUGCCUUAAGCACCAAU | 27 | 489 | AUUGGUGCUUAAGGCAUCA | 1678 |
| 489 | UCACGGCCACAAGGUCGUU | 28 | 489 | UCACGGCCACAAGGUCGUU | 28 | 507 | AACGACCUUGUGGCCGUGA | 1679 |
| 507 | UGAGCUGGUUGCAGAAAUG | 29 | 507 | UGAGCUGGUUGCAGAAAUG | 29 | 525 | CAUUUCUGCAACCAGCUCA | 1680 |
| 525 | GGACGGCAUUCAGUACGGU | 30 | 525 | GGACGGCAUUCAGUACGGU | 30 | 543 | ACCGUACUGAAUGCCGUCC | 1681 |
| 543 | UCGUAGCGGUAUAACACUG | 31 | 543 | UCGUAGCGGUAUAACACUG | 31 | 561 | CAGUGUUAUACCGCUACGA | 1682 |
| 561 | GGGAGUACUCGUGCCACAU | 32 | 561 | GGGAGUACUCGUGCCACAU | 32 | 579 | AUGUGGCACGAGUACUCCC | 1683 |
| 579 | UGUGGGCGAAACCCCAAUU | 33 | 579 | UGUGGGCGAAACCCCAAUU | 33 | 597 | AAUUGGGGUUUCGCCCACA | 1684 |
| 597 | UGCAUACCGCAAUGUUCUU | 34 | 597 | UGCAUACCGCAAUGUUCUU | 34 | 615 | AAGAACAUUGCGGUAUGCA | 1685 |
| 615 | UCUUCGUAAGAACGGUAAU | 35 | 615 | UCUUCGUAAGAACGGUAAU | 35 | 633 | AUUACCGUUCUUACGAAGA | 1686 |
| 633 | UAAGGGAGCCGGUGGUCAU | 36 | 633 | UAAGGGAGCCGGUGGUCAU | 36 | 651 | AUGACCACCGGCUCCCUUA | 1687 |
| 651 | UAGCUAUGGCAUCGAUCUA | 37 | 651 | UAGCUAUGGCAUCGAUCUA | 37 | 669 | UAGAUCGAUGCCAUAGCUA | 1668 |
| 669 | AAAGUCUUAUGACUUAGGU | 38 | 669 | AAAGUCUUAUGACUUAGGU | 38 | 687 | ACCUAAGUCAUAAGACUUU | 1689 |
| 687 | UGACGAGCUUGGCACUGAU | 39 | 687 | UGACGAGCUUGGCACUGAU | 39 | 705 | AUCAGUGCCAAGCUCGUCA | 1690 |
| 705 | UCCCAUUGAAGAUUAUGAA | 40 | 705 | UCCCAUUGAAGAUUAUGAA | 40 | 723 | UUCAUAAUCUUCAAUGGGA | 1691 |
| 723 | ACAAAACUGGAACACUAAG | 41 | 723 | ACAAAACUGGAACACUAAG | 41 | 741 | CUUAGUGUUCCAGUUUUGU | 1692 |
| 741 | GCAUGGCAGUGGUGCACUC | 42 | 741 | GCAUGGCAGUGGUGCACUC | 42 | 759 | GAGUGCACCACUGCCAUGU | 1693 |
| 759 | CCGUGAACUCACUCGUGAG | 43 | 759 | CCGUGAACUCACUCGUGAG | 43 | 777 | CUCACGAGUGAGUUCACGG | 1694 |
| 777 | GCUCAAUGGAGGUGCAGUC | 44 | 777 | GCUCAAUGGAGGUGCAGUC | 44 | 795 | GACUGCACCUCCAUUGAGC | 1695 |
| 795 | CACUCGCUAUGUCGACAAC | 45 | 795 | CACUCGCUAUGUCGACAAC | 45 | 813 | GUUGUCGACAUAGCGAGUG | 1696 |
| 813 | CAAUUUCUGUGGCCCAGAU | 46 | 813 | CAAUUUCUGUGGCCCAGAU | 46 | 831 | AUCUGGGCCACAGAAAUUG | 1697 |
| 831 | UGGGUACCCUCUUGAUUGC | 47 | 831 | UGGGUACCCUCUUGAUUGC | 47 | 849 | GCAAUCAAGAGGGUACCCA | 1698 |
| 849 | CAUCAAAGAUUUUCUCGCA | 48 | 849 | CAUCAAAGAUUUUCUCGCA | 48 | 867 | UGCGAGAAAAUCUUUGAUG | 1699 |
| 867 | ACGCGCGGGCAAGUCAAUG | 49 | 867 | ACGCGCGGGCAAGUCAAUG | 49 | 885 | CAUUGACUUGCCCGCGCGU | 1700 |
| 885 | GUGCACUCUUUCCGAACAA | 50 | 885 | GUGCACUCUUUCCGAACAA | 50 | 903 | UUGUUCGGAAAGAGUGCAC | 1701 |
| 903 | ACUUGAUUACAUCGAGUCG | 51 | 903 | ACUUGAUUACAUCGAGUCG | 51 | 921 | CGACUCGAUGUAAUCAAGU | 1702 |
| 921 | GAAGAGAGGUGUCUACUGC | 52 | 921 | GAAGAGAGGUGUCUACUGC | 52 | 939 | GCAGUAGACACCUCUCUUC | 1703 |
| 939 | CUGCCGUGACCAUGAGCAU | 53 | 939 | CUGCCGUGACCAUGAGCAU | 53 | 957 | AUGCUCAUGGUCACGGCAG | 1704 |
| 957 | UGAAAUUGCCUGGUUCACU | 54 | 957 | UGAAAUUGCCUGGUUCACU | 54 | 975 | AGUGAACCAGGCAAUUUCA | 1705 |
| 975 | UGAGCGCUCUGAUAAGAGC | 55 | 975 | UGAGCGCUCUGAUAAGAGC | 55 | 993 | GCUCUUAUCAGAGCGCUCA | 1706 |
| 993 | CUACGAGCACCAGACACCC | 56 | 993 | CUACGAGCACCAGACACCC | 56 | 1011 | GGGUGUCUGGUGCUCGUAG | 1707 |
| 1011 | CUUCGAAAUUAAGAGUGCC | 57 | 1011 | CUUCGAAAUUAAGAGUGCC | 57 | 1029 | GGCACUCUUAAUUUCGAAG | 1708 |
| 1029 | CAAGAAAUUUGACACUUUC | 58 | 1029 | CAAGAAAUUUGACACUUUC | 58 | 1047 | GAAAGUGUCAAAUUUCUUG | 1709 |
| 1047 | CAAAGGGGAAUGCCCAAAG | 59 | 1047 | CAAAGGGGAAUGCCCAAAG | 59 | 1065 | CUUUGGGCAUUCCCCUUUG | 1710 |
| 1065 | GUUUGUGUUUCCUCUUAAC | 60 | 1065 | GUUUGUGUUUCCUCUUAAC | 60 | 1083 | GUUAAGAGGAAACACAAAC | 1711 |
| 1083 | CUCAAAAGUCAAAGUCAUU | 61 | 1083 | CUCAAAAGUCAAAGUCAUU | 61 | 1101 | AAUGACUUUGACUUUUGAG | 1712 |
| 1101 | UCAACCACGUGUUGAAAAG | 62 | 1101 | UCAACCACGUGUUGAAAAG | 62 | 1119 | CUUUUCAACACGUGGUUGA | 1713 |
| 1119 | GAAAAAGACUGAGGGUUUC | 63 | 1119 | GAAAAAGACUGAGGGUUUC | 63 | 1137 | GAAACCCUCAGUCUUUUUC | 1714 |
| 1137 | CAUGGGGCGUAUACGCUCU | 64 | 1137 | CAUGGGGCGUAUACGCUCU | 64 | 1155 | AGAGCGUAUACGCCCCAUG | 1715 |
| 1155 | UGUGUACCCUGUUGCAUCU | 65 | 1155 | UGUGUACCCUGUUGCAUCU | 65 | 1173 | AGAUGCAACAGGGUACACA | 1716 |
| 1173 | UCCACAGGAGUGUAACAAU | 66 | 1173 | UCCACAGGAGUGUAACAAU | 66 | 1191 | AUUGUUACACUCCUGUGGA | 1717 |
| 1191 | UAUGCACUUGUCUACCUUG | 67 | 1191 | UAUGCACUUGUCUACCUUG | 67 | 1209 | CAAGGUAGACAAGUGCAUA | 1718 |
| 1209 | GAUGAAAUGUAAUCAUUGC | 68 | 1209 | GAUGAAAUGUAAUCAUUGC | 68 | 1227 | GCAAUGAUUACAUUUCAUC | 1719 |
| 1227 | CGAUGAAGUUUCAUGGCAG | 69 | 1227 | CGAUGAAGUUUCAUGGCAG | 69 | 1245 | CUGCCAUGAAACUUCAUCG | 1720 |
| 1245 | GACGUGCGACUUUCUGAAA | 70 | 1245 | GACGUGCGACUUUCUGAAA | 70 | 1263 | UUUCAGAAAGUCGCACGUC | 1721 |
| 1263 | AGCCACUUGUGAACAUUGU | 71 | 1263 | AGCCACUUGUGAACAUUGU | 71 | 1281 | ACAAUGUUCACAAGUGGCU | 1722 |
| 1281 | UGGCACUGAAAAUUUAGUU | 72 | 1281 | UGGCACUGAAAAUUUAGUU | 72 | 1299 | AACUAAAUUUUCAGUGCCA | 1723 |
| 1299 | UAUUGAAGGACCUACUACA | 73 | 1299 | UAUUGAAGGACCUACUACA | 73 | 1317 | UGUAGUAGGUCCUUCAAUA | 1724 |
| 1317 | AUGUGGGUACCUACCUACU | 74 | 1317 | AUGUGGGUACCUACCUACU | 74 | 1335 | AGUAGGUAGGUACCCACAU | 1725 |
| 1335 | UAAUGCUGUAGUGAAAAUG | 75 | 1335 | UAAUGCUGUAGUGAAAAUG | 75 | 1353 | CAUUUUCACUACAGCAUUA | 1726 |
| 1353 | GCCAUGUCCUGCCUGUCAA | 76 | 1353 | GCCAUGUCCUGCCUGUCAA | 76 | 1371 | UUGACAGGCAGGACAUGGC | 1727 |
| 1371 | AGACCCAGAGAUUGGACCU | 77 | 1371 | AGACCCAGAGAUUGGACCU | 77 | 1389 | AGGUCCAAUCUCUGGGUCU | 1728 |
| 1389 | UGAGCAUAGUGUUGCAGAU | 78 | 1389 | UGAGCAUAGUGUUGCAGAU | 78 | 1407 | AUCUGCAACACUAUGCUCA | 1729 |
| 1407 | UUAUCACAACCACUCAAAC | 79 | 1407 | UUAUCACAACCACUCAAAC | 79 | 1425 | GUUUGAGUGGUUGUGAUAA | 1730 |
| 1425 | CAUUGAAACUCGACUCCGC | 80 | 1425 | CAUUGAAACUCGACUCCGC | 80 | 1443 | GCGGAGUCGAGUUUCAAUG | 1731 |
| 1443 | CAAGGGAGGUAGGACUAGA | 81 | 1443 | CAAGGGAGGUAGGACUAGA | 81 | 1461 | UCUAGUCCUACCUCCCUUG | 1732 |
| 1461 | AUGUUUUGGAGGCUGUGUG | 82 | 1461 | AUGUUUUGGAGGCUGUGUG | 82 | 1479 | CACACAGCCUCCAAAACAU | 1733 |
| 1479 | GUUUGCCUAUGUUGGCUGC | 83 | 1479 | GUUUGCCUAUGUUGGCUGC | 83 | 1497 | GCAGCCAACAUAGGCAAAC | 1734 |
| 1497 | CUAUAAUAAGCGUGCCUAC | 84 | 1497 | CUAUAAUAAGCGUGCCUAC | 84 | 1515 | GUAGGCACGCUUAUUAUAG | 1735 |
| 1515 | CUGGGUUCCUCGUGCUAGU | 85 | 1515 | CUGGGUUCCUCGUGCUAGU | 85 | 1533 | ACUAGCACGAGGAACCCAG | 1736 |
| 1533 | UGCUGAUAUUGGCUCAGGC | 86 | 1533 | UGCUGAUAUUGGCUCAGGC | 86 | 1551 | GCCUGAGCCAAUAUCAGCA | 1737 |
| 1551 | CCAUACUGGCAUUACUGGU | 87 | 1551 | CCAUACUGGCAUUACUGGU | 87 | 1569 | ACCAGUAAUGCCAGUAUGG | 1738 |
| 1569 | UGACAAUGUGGAGACCUUG | 88 | 1569 | UGACAAUGUGGAGACCUUG | 88 | 1587 | CAAGGUCUCCACAUUGUCA | 1739 |
| 1587 | GAAUGAGGAUCUCCUUGAG | 89 | 1587 | GAAUGAGGAUCUCCUUGAG | 89 | 1605 | CUCAAGGAGAUCCUCAUUC | 1740 |
| 1605 | GAUACUGAGUCGUGAACGU | 90 | 1605 | GAUACUGAGUCGUGAACGU | 90 | 1623 | ACGUUCACGACUCAGUAUC | 1741 |
| 1623 | UGUUAACAUUAACAUUGUU | 91 | 1623 | UGUUAACAUUAACAUUGUU | 91 | 1641 | AACAAUGUUAAUGUUAACA | 1742 |
| 1641 | UGGCGAUUUUCAUUUGAAU | 92 | 1641 | UGGCGAUUUUCAUUUGAAU | 92 | 1659 | AUUCAAAUGAAAAUCGCCA | 1743 |
| 1659 | UGAAGAGGUUGCCAUCAUU | 93 | 1659 | UGAAGAGGUUGCCAUCAUU | 93 | 1677 | AAUGAUGGCAACCUCUUCA | 1744 |
| 1677 | UUUGGCAUCUUUCUCUGCU | 94 | 1677 | UUUGGCAUCUUUCCUGCU | 94 | 1695 | AGCAGAGAAAGAUGCCAAA | 1745 |
| 1695 | UUCUACAAGUGCCUUUAUU | 95 | 1695 | UUCUACAAGUGCCUUUAUU | 95 | 1713 | AAUAAAGGCACUUGUAGAA | 1746 |
| 1713 | UGACACUAUAAAGAGUCUU | 96 | 1713 | UGACACUAUAAAGAGUCUU | 96 | 1731 | AAGACUCUUUAUAGUGUCA | 1747 |
| 1731 | UGAUUACAAGUCUUUCAAA | 97 | 1731 | UGAUUACAAGUCUUUCAAA | 97 | 1749 | UUUGAAAGACUUCUAAUCA | 1748 |
| 1749 | AACCAUUGUUGAGUCCUGC | 98 | 1749 | AACCAUUGUUGAGUCCUGC | 98 | 1767 | GCAGGACUCAACAAUGGUU | 1749 |
| 1767 | CGGUAACUAUAAAGUUACC | 99 | 1767 | CGGUAACUAUAAAGUUACC | 99 | 1785 | GGUAACUUUAUAGUUACCG | 1750 |
| 1785 | CAAGGGAAAGCCCGUAAAA | 100 | 1785 | CAAGGGAAAGCCCGUAAAA | 100 | 1803 | UUUUACGGGCUUUCCCUUG | 1751 |
| 1803 | AGGUGCUUGGAACAUUGGA | 101 | 1803 | AGGUGCUUGGAACAUUGGA | 101 | 1821 | UCCAAUGUUCCAAGCACCU | 1752 |
| 1821 | ACAACAGAGAUCAGUUUUA | 102 | 1821 | ACAACAGAGAUCAGUUUUA | 102 | 1839 | UAAAACUGAUCUCUGUUGU | 1753 |
| 1839 | AACACCACUGUGUGGUUUU | 103 | 1839 | AACACCACUGUGUGGUUUU | 103 | 1857 | AAAACCACACAGUGGUGUU | 1754 |
| 1857 | UCCCUCACAGGCUGCUGGU | 104 | 1857 | UCCCUCACAGGCUGCUGGU | 104 | 1875 | ACCAGCAGCCUGUGAGGGA | 1755 |
| 1875 | UGUUAUCAGAUCAAUUUUU | 105 | 1875 | UGUUAUCAGAUCAAUUUUU | 105 | 1893 | AAAAAUUGAUCUGAUAACA | 1756 |
| 1893 | UGCGCGCACACUUGAUGCA | 106 | 1893 | UGCGCGCACACUUGAUGCA | 106 | 1911 | UGCAUCAAGUGUGCGCGCA | 1757 |
| 1911 | AGCAAACCACUCAAUUCCU | 107 | 1911 | AGCAAACCACUCAAUUCCU | 107 | 1929 | AGGAAUUGAGUGGUUUGCU | 1758 |
| 1929 | UGAUUUGCAAAGAGCAGCU | 108 | 1929 | UGAUUUGCAAAGAGCAGCU | 108 | 1947 | AGCUGCUCUUUGCAAAUCA | 1759 |
| 1947 | UGUCACCAUACUUGAUGGU | 109 | 1947 | UGUCACCAUACUUGAUGGU | 109 | 1965 | ACCAUCAAGUAUGGUGACA | 1760 |
| 1965 | UAUUUCUGAACAGUCAUUA | 110 | 1965 | UAUUUCUGAACAGUCAUUA | 110 | 1983 | UAAUGACUGUUCAGAAAUA | 1761 |
| 1983 | ACGUCUUGUCGACGCCAUG | 111 | 1983 | ACGUCUUGUCGACGCCAUG | 111 | 2001 | CAUGGCGUCGACAAGACGU | 1762 |
| 2001 | GGUUUAUACUUCAGACCUG | 112 | 2001 | GGUUUAUACUUCAGACCUG | 112 | 2019 | CAGGUCUGAAGUAUAAACC | 1763 |
| 2019 | GCUCACCAACAGUGUCAUU | 113 | 2019 | GCUCACCAACAGUGUCAUU | 113 | 2037 | AAUGACACUGUUGGUGAGC | 1764 |
| 2037 | UAUUAUGGCAUAUGUAACU | 114 | 2037 | UAUUAUGGCAUAUGUAACU | 114 | 2055 | AGUUACAUAUGCCAUAAUA | 1765 |
| 2055 | UGGUGGUCUUGUACAACAG | 115 | 2055 | UGGUGGUCUUGUACAACAG | 115 | 2073 | CUGUUGUACAAGACCACCA | 1766 |
| 2073 | GACUUCUCAGUGGUUGUCU | 116 | 2073 | GACUUCUCAGUGGUUGUCU | 116 | 2091 | AGACAACCACUGAGAAGUC | 1767 |
| 2091 | UAAUCUUUUGGGCACUACU | 117 | 2091 | UAAUCUUUUGGGCACUACU | 117 | 2109 | AGUAGUGCCCAAAAGAUUA | 1768 |
| 2109 | UGUUGAAAAACUCAGGCCU | 118 | 2109 | UGUUGAAAAACUCAGGCCU | 118 | 2127 | AGGCCUGAGUUUUUCAACA | 1769 |
| 2127 | UAUCUUUGAAUGGAUUGAG | 119 | 2127 | UAUCUUUGAAUGGAUUGAG | 119 | 2145 | CUCAAUCCAUUCAAAGAUA | 1770 |
| 2145 | GGCGAAACUUAGUGCAGGA | 120 | 2145 | GGCGAAACUUAGUGCAGGA | 120 | 2163 | UCCUGCACUAAGUUUCGCC | 1771 |
| 2163 | AGUUGAAUUUCUCAAGGAU | 121 | 2163 | AGUUGAAUUUCUCAAGGAU | 121 | 2181 | AUCCUUGAGAAAUUCAACU | 1772 |
| 2181 | UGCUUGGGAGAUUCUCAAA | 122 | 2181 | UGCUUGGGAGAUUCUCAAA | 122 | 2199 | UUUGAGAAUCUCCCAAGCA | 1773 |
| 2199 | AUUUCUCAUUACAGGUGUU | 123 | 2199 | AUUUCUCAUUACAGGUGUU | 123 | 2217 | AACACCUGUAAUGAGAAAU | 1774 |
| 2217 | UUUUGACAUCGUCAAGGGU | 124 | 2217 | UUUUGACAUCGUCAAGGGU | 124 | 2235 | ACCCUUGACGAUGUCAAAA | 1775 |
| 2235 | UCAAAUACAGGUUGCUUCA | 125 | 2235 | UCAAAUACAGGUUGCUUCA | 125 | 2253 | UGAAGCAACCUGUAUUUGA | 1776 |
| 2253 | AGAUAACAUCAAGGAUUGU | 126 | 2253 | AGAUAACAUCAAGGAUUGU | 126 | 2271 | ACAAUCCUUGAUGUUAUCU | 1777 |
| 2271 | UGUAAAAUGCUUCAUUGAU | 127 | 2271 | UGUAAAAUGCUUCAUUGAU | 127 | 2289 | AUCAAUGAAGCAUUUUACA | 1778 |
| 2289 | UGUUGUUAACAAGGCACUC | 128 | 2289 | UGUUGUUAACAAGGCACUC | 128 | 2307 | GAGUGCCUUGUUAACAACA | 1779 |
| 2307 | CGAAAUGUGCAUUGAUCAA | 129 | 2307 | CGAAAUGUGCAUUGAUCAA | 129 | 2325 | UUGAUCAAUGCACAUUUCG | 1780 |
| 2325 | AGUCACUAUCGCUGGCGCA | 130 | 2325 | AGUCACUAUCGCUGGCGCA | 130 | 2343 | UGCGCCAGCGAUAGUGACU | 1781 |
| 2343 | AAAGUUGCGAUCACUCAAC | 131 | 2343 | AAAGUUGCGAUCACUCAAC | 131 | 2361 | GUUGAGUGAUCGCAACUUU | 1782 |
| 2361 | CUUAGGUGAAGUCUUCAUC | 132 | 2361 | CUUAGGUGAAGUCUUCAUC | 132 | 2379 | GAUGAAGACUUCACCUAAG | 1783 |
| 2379 | CGCUCAAAGCAAGGGACUU | 133 | 2379 | CGCUCAAAGCAAGGGACUU | 133 | 2397 | AAGUCCCUUGCUUUGAGCG | 1784 |
| 2397 | UUACCGUCAGUGUAUACGU | 134 | 2397 | UUACCGUCAGUGUAUACGU | 134 | 2415 | ACGUAUACACUGACGGUAA | 1785 |
| 2415 | UGGCAAGGAGCAGCUGCAA | 135 | 2415 | UGGCAAGGAGCAGCUGCAA | 135 | 2433 | UUGCAGCUGCUCCUUGCCA | 1786 |
| 2433 | ACUACUCAUGCCUCUUAAG | 136 | 2433 | ACUACUCAUGCCUCUUAAG | 136 | 2451 | CUUAAGAGGCAUGAGUAGU | 1787 |
| 2451 | GGCACCAAAAGAAGUAACC | 137 | 2451 | GGCACCAAAAGAAGUAACC | 137 | 2469 | GGUUACUUCUUUUGGUGCC | 1788 |
| 2469 | CUUUCUUGAAGGUGAUUCA | 138 | 2469 | CUUUCUUGAAGGUGAUUCA | 138 | 2487 | UGAAUCACCUUCAAGAAAG | 1789 |
| 2487 | ACAUGACACAGUACUUACC | 139 | 2487 | ACAUGACACAGUACUUACC | 139 | 2505 | GGUAAGUACUGUGUCAUGU | 1790 |
| 2505 | CUCUGAGGAGGUUGUUCUC | 140 | 2505 | CUCUGAGGAGGUUGUUCUC | 140 | 2523 | GAGAACAACCUCCUCAGAG | 1791 |
| 2523 | CAAGAACGGUGAACUCGAA | 141 | 2523 | CAAGAACGGUGAACUCGAA | 141 | 2541 | UUCGAGUUCACCGUUCUUG | 1792 |
| 2541 | AGCACUCGAGACGCCCGUU | 142 | 2541 | AGCACUCGAGACGCCCGUU | 142 | 2559 | AACGGGCGUCUCGAGUGCU | 1793 |
| 2559 | UGAUAGCUUCACAAAUGGA | 143 | 2559 | UGAUAGCUUCACAAAUGGA | 143 | 2577 | UCCAUUUGUGAAGCUAUCA | 1794 |
| 2577 | AGCUAUCGUCGGCACACCA | 144 | 2577 | AGCUAUCGUCGGCACACCA | 144 | 2595 | UGGUGUGCCGACGAUAGCU | 1795 |
| 2595 | AGUCUGUGUAAAUGGCCUC | 145 | 2595 | AGUCUGUGUAAAUGGCCUC | 145 | 2613 | GAGGCCAUUUACACAGACU | 1796 |
| 2613 | CAUGCUCUUAGAGAUUAAG | 146 | 2613 | CAUGCUCUUAGAGAUUAAG | 146 | 2631 | CUUAAUCUCUAAGAGCAUG | 1797 |
| 2631 | GGACAAAGAACAAUACUGC | 147 | 2631 | GGACAAAGAACAAUACUGC | 147 | 2649 | GCAGUAUUGUUCUUUGUCC | 1798 |
| 2649 | CGCAUUGUCUCCUGGUUUA | 148 | 2649 | CGCAUUGUCUCCUGGUUUA | 148 | 2667 | UAAACCAGGAGACAAUGCG | 1799 |
| 2667 | ACUGGCUACAAACAAUGUC | 149 | 2667 | ACUGGCUACAAACAAUGUC | 149 | 2685 | GACAUUGUUUGUAGCCAGU | 1800 |
| 2685 | CUUUCGCUUAAAAGGGGGU | 150 | 2685 | CUUUCGCUUAAAAGGGGGU | 150 | 2703 | ACCCCCUUUUAAGCGAAAG | 1801 |
| 2703 | UGCACCAAUUAAAGGUGUA | 151 | 2703 | UGCACCAAUUAAAGGUGUA | 151 | 2721 | UACACCUUUAAUUGGUGCA | 1802 |
| 2721 | AACCUUUGGAGAAGAUACU | 152 | 2721 | AACCUUUGGAGAAGAUACU | 152 | 2739 | AGUAUCUUCUCCAAAGGUU | 1803 |
| 2739 | UGUUUGGGAAGUUCAAGGU | 153 | 2739 | UGUUUGGGAAGUUCAAGGU | 153 | 2757 | ACCUUGAACUUCCCAAACA | 1804 |
| 2757 | UUACAAGAAUGUGAGAAUC | 154 | 2757 | UUACAAGAAUGUGAGAAUC | 154 | 2775 | GAUUCUCACAUUCUUGUAA | 1805 |
| 2775 | CACAUUUGAGCUUGAUGAA | 155 | 2775 | CACAUUUGAGCUUGAUGAA | 155 | 2793 | UUCAUCAAGCUCAAAUGUG | 1806 |
| 2793 | ACGUGUUGACAAAGUGCUU | 156 | 2793 | ACGUGUUGACAAAGUGCUU | 156 | 2811 | AAGCACUUUGUCAACACGU | 1807 |
| 2811 | UAAUGAAAAGUGCUCUGUC | 157 | 2811 | UAAUGAAAAGUGCUCUGUC | 157 | 2829 | GACAGAGCACUUUUCAUUA | 1808 |
| 2829 | CUACACUGUUGAAUCCGGU | 158 | 2829 | CUACACUGUUGAAUCCGGU | 158 | 2847 | ACCGGAUUCAACAGUGUAG | 1809 |
| 2847 | UACCGAAGUUACUGAGUUU | 159 | 2847 | UACCGAAGUUACUGAGUUU | 159 | 2865 | AAACUCAGUAACUUCGGUA | 1810 |
| 2865 | UGCAUGUGUUGUAGCAGAG | 160 | 2865 | UGCAUGUGUUGUAGCAGAG | 160 | 2883 | CUCUGCUACAACACAUGCA | 1811 |
| 2883 | GGCUGUUGUGAAGACUUUA | 161 | 2883 | GGCUGUUGUGAAGACUUUA | 161 | 2901 | UAAAGUCUUCACAACAGCC | 1812 |
| 2901 | ACAACCAGUUUCUGAUCUC | 162 | 2901 | ACAACCAGUUUCUGAUCUC | 162 | 2919 | GAGAUCAGAAACUGGUUGU | 1813 |
| 2919 | CCUUACCAACAUGGGUAUU | 163 | 2919 | CCUUACCAACAUGGGUAUU | 163 | 2937 | AAUACCCAUGUUGGUAAGG | 1814 |
| 2937 | UGAUCUUGAUGAGUGGAGU | 164 | 2937 | UGAUCUUGAUGAGUGGAGU | 164 | 2955 | ACUCCACUCAUCAAGAUCA | 1815 |
| 2955 | UGUAGCUACAUUCUACUUA | 165 | 2955 | UGUAGCUACAUUCUACUUA | 165 | 2973 | UAAGUAGAAUGUAGCUACA | 1816 |
| 2973 | AUUUGAUGAUGCUGGUGAA | 166 | 2973 | AUUUGAUGAUGCUGGUGAA | 166 | 2991 | UUCACCAGCAUCAUCAAAU | 1817 |
| 2991 | AGAAAACUUUUCAUCACGU | 167 | 2991 | AGAAAACUUUUCAUCACGU | 167 | 3009 | ACGUGAUGAAAAGUUUUCU | 1818 |
| 3009 | UAUGUAUUGUUCCUUUUAC | 168 | 3009 | UAUGUAUUGUUCCUUUUAC | 168 | 3027 | GUAAAAGGAACAAUACAUA | 1819 |
| 3027 | CCCUCCAGAUGAGGAAGAA | 169 | 3027 | CCCUCCAGAUGAGGAAGAA | 169 | 3045 | UUCUUCCUCAUCUGGAGGG | 1820 |
| 3045 | AGAGGACGAUGCAGAGUGU | 170 | 3045 | AGAGGACGAUGCAGAGUGU | 170 | 3063 | ACACUCUGCAUCGUCCUCU | 1821 |
| 3063 | UGAGGAAGAAGAAAUUGAU | 171 | 3063 | UGAGGAAGAAGAAAUUGAU | 171 | 3081 | AUCAAUUUCUUCUUCCUCA | 1822 |
| 3081 | UGAAACCUGUGAACAUGAG | 172 | 3081 | UGAAACCUGUGAACAUGAG | 172 | 3099 | CUCAUGUUCACAGGUUUCA | 1823 |
| 3099 | GUACGGUACAGAGGAUGAU | 173 | 3099 | GUACGGUACAGAGGAUGAU | 173 | 3117 | AUCAUCCUCUGUACCGUAC | 1824 |
| 3117 | UUAUCAAGGUCUCCCUCUG | 174 | 3117 | UUAUCAAGGUCUCCCUCUG | 174 | 3135 | CAGAGGGAGACCUUGAUAA | 1825 |
| 3135 | GGAAUUUGGUGCCUCAGCU | 175 | 3135 | GGAAUUUGGUGCCUCAGCU | 175 | 3153 | AGCUGAGGCACCAAAUUCC | 1826 |
| 3153 | UGAAACAGUUCGAGUUGAG | 176 | 3153 | UGAAACAGUUCGAGUUGAG | 176 | 3171 | CUCAACUCGAACUGUUUCA | 1827 |
| 3171 | GGAAGAAGAAGAGGAAGAC | 177 | 3171 | GGAAGAAGAAGAGGAAGAC | 177 | 3189 | GUCUUCCUCUUCUUCUUCC | 1828 |
| 3189 | CUGGCUGGAUGAUACUACU | 178 | 3189 | CUGGCUGGAUGAUACUACU | 178 | 3207 | AGUAGUAUCAUCCAGCCAG | 1829 |
| 3207 | UGAGCAAUCAGAGAUUGAG | 179 | 3207 | UGAGCAAUCAGAGAUUGAG | 179 | 3225 | CUCAAUCUCUGAUUGCUCA | 1830 |
| 3225 | GCCAGAACCAGAACCUACA | 180 | 3225 | GCCAGAACCAGAACCUACA | 180 | 3243 | UGUAGGUUCUGGUUCUGGC | 1831 |
| 3243 | ACCUGAAGAACCAGUUAAU | 181 | 3243 | ACCUGAAGAACCAGUUAAU | 181 | 3261 | AUUAACUGGUUCUUCAGGU | 1832 |
| 3261 | UCAGUUUACUGGUUAUUUA | 182 | 3261 | UCAGUUUACUGGUUAUUUA | 182 | 3279 | UAAAUAACCAGUAAACUGA | 1833 |
| 3279 | AAAACUUACUGACAAUGUU | 183 | 3279 | AAAACUUACUGACAAUGUU | 183 | 3297 | AACAUUGUCAGUAAGUUUU | 1834 |
| 3297 | UGCCAUUAAAUGUGUUGAC | 184 | 3297 | UGCCAUUAAAUGUGUUGAC | 184 | 3315 | GUCAACACAUUUAAUGGCA | 1835 |
| 3315 | CAUCGUUAAGGAGGCACAA | 185 | 3315 | CAUCGUUAAGGAGGCACAA | 185 | 3333 | UUGUGCCUCCUUAACGAUG | 1836 |
| 3333 | AAGUGCUAAUCCUAUGGUG | 186 | 3333 | AAGUGCUAAUCCUAUGGUG | 186 | 3351 | CACCAUAGGAUUAGCACUU | 1837 |
| 3351 | GAUUGUAAAUGCUGCUAAC | 187 | 3351 | GAUUGUAAAUGCUGCUAAC | 187 | 3369 | GUUAGCAGCAUUUACAAUC | 1838 |
| 3369 | CAUACACCUGAAACAUGGU | 188 | 3369 | CAUACACCUGAAACAUGGU | 188 | 3387 | ACCAUGUUUCAGGUGUAUG | 1839 |
| 3387 | UGGUGGUGUAGCAGGUGCA | 189 | 3387 | UGGUGGUGUAGCAGGUGCA | 189 | 3405 | UGCACCUGCUACACCACCA | 1840 |
| 3405 | ACUCAACAAGGCAACCAAU | 190 | 3405 | ACUCAACAAGGCAACCAAU | 190 | 3423 | AUUGGUUGCCUUGUUGAGU | 1841 |
| 3423 | UGGUGCCAUGCAAAAGGAG | 191 | 3423 | UGGUGCCAUGCAAAAGGAG | 191 | 3441 | CUCCUUUUGCAUGGCACCA | 1842 |
| 3441 | GAGUGAUGAUUACAUUAAG | 192 | 3441 | GAGUGAUGAUUACAUUAAG | 192 | 3459 | CUUAAUGUAAUCAUCACUC | 1843 |
| 3459 | GCUAAAUGGCCCUCUUACA | 193 | 3459 | GCUAAAUGGCCCUCUUACA | 193 | 3477 | UGUAAGAGGGCCAUUUAGC | 1844 |
| 3477 | AGUAGGAGGGUCUUGUUUG | 194 | 3477 | AGUAGGAGGGUCUUGUUUG | 194 | 3495 | CAAACAAGACCCUCCUACU | 1845 |
| 3495 | GCUUUCUGGACAUAAUCUU | 195 | 3495 | GCUUUCUGGACAUAAUCUU | 195 | 3513 | AAGAUUAUGUCCAGAAAGC | 1846 |
| 3513 | UGCUAAGAAGUGUCUGCAU | 196 | 3513 | UGCUAAGAAGUGUCUGCAU | 196 | 3531 | AUGCAGACACUUCUUAGCA | 1847 |
| 3531 | UGUUGUUGGACCUAACCUA | 197 | 3531 | UGUUGUUGGACCUAACCUA | 197 | 3549 | UAGGUUAGGUCCAACAACA | 1848 |
| 3549 | AAAUGCAGGUGAGGACAUC | 198 | 3549 | AAAUGCAGGUGAGGACAUC | 198 | 3567 | GAUGUCCUCACCUGCAUUU | 1849 |
| 3567 | CCAGCUUCUUAAGGCAGCA | 199 | 3567 | CCAGCUUCUUAAGGCAGCA | 199 | 3585 | UGCUGCCUUAAGAAGCUGG | 1850 |
| 3585 | AUAUGAAAAUUUCAAUUCA | 200 | 3585 | AUAUGAAAAUUUCAAUUCA | 200 | 3603 | UGAAUUGAAAUUUUCAUAU | 1851 |
| 3603 | ACAGGACAUCUUACUUGCA | 201 | 3603 | ACAGGACAUCUUACUUGCA | 201 | 3621 | UGCAAGUAAGAUGUCCUGU | 1852 |
| 3621 | ACCAUUGUUGUCAGCAGGC | 202 | 3621 | ACCAUUGUUGUCAGCAGGC | 202 | 3639 | GCCUGCUGACAACAAUGGU | 1853 |
| 3639 | CAUAUUUGGUGCUAAACCA | 203 | 3639 | CAUAUUUGGUGCUAAACCA | 203 | 3657 | UGGUUUAGCACCAAAUAUG | 1854 |
| 3657 | ACUUCAGUCUUUACAAGUG | 204 | 3657 | ACUUCAGUCUUUACAAGUG | 204 | 3675 | CACUUGUAAAGACUGAAGU | 1855 |
| 3675 | GUGCGUGCAGACGGUUCGU | 205 | 3675 | GUGCGUGCAGACGGUUCGU | 205 | 3693 | ACGAACCGUCUGCACGCAC | 1856 |
| 3693 | UACACAGGUUUAUAUUGCA | 206 | 3693 | UACACAGGUUUAUAUUGCA | 206 | 3711 | UGCAAUAUAAACCUGUGUA | 1857 |
| 3711 | AGUCAAUGACAAAGCUCUU | 207 | 3711 | AGUCAAUGACAAAGCUCUU | 207 | 3729 | AAGAGCUUUGUCAUUGACU | 1858 |
| 3729 | UUAUGAGCAGGUUGUCAUG | 208 | 3729 | UUAUGAGCAGGUUGUCAUG | 208 | 3747 | CAUGACAACCUGCUCAUAA | 1859 |
| 3747 | GGAUUAUCUUGAUAACCUG | 209 | 3747 | GGAUUAUCUUGAUAACCUG | 209 | 3765 | CAGGUUAUCAAGAUAAUCC | 1860 |
| 3765 | GAAGCCUAGAGUGGAAGCA | 210 | 3765 | GAAGCCUAGAGUGGAAGCA | 210 | 3783 | UGCUUCCACUCUAGGCUUC | 1861 |
| 3783 | ACCUAAACAAGAGGAGCCA | 211 | 3783 | ACCUAAACAAGAGGAGCCA | 211 | 3801 | UGGCUCCUCUUGUUUAGGU | 1862 |
| 3801 | ACCAAACACAGAAGAUUCC | 212 | 3801 | ACCAAACACAGAAGAUUCC | 212 | 3819 | GGAAUCUUCUGUGUUUGGU | 1863 |
| 3819 | CAAAACUGAGGAGAAAUCU | 213 | 3819 | CAAAACUGAGGAGAAAUCU | 213 | 3837 | AGAUUUCUCCUCAGUUUUG | 1864 |
| 3837 | UGUCGUACAGAAGCCUGUC | 214 | 3837 | UGUCGUACAGAAGCCUGUC | 214 | 3855 | GACAGGCUUCUGUACGACA | 1865 |
| 3855 | CGAUGUGAAGCCAAAAAUU | 215 | 3855 | CGAUGUGAAGCCAAAAAUU | 215 | 3873 | AAUUUUUGGCUUCACAUCG | 1866 |
| 3873 | UAAGGCCUGCAUUGAUGAG | 216 | 3873 | UAAGGCCUGCAUUGAUGAG | 216 | 3891 | CUCAUCAAUGCAGGCCUUA | 1867 |
| 3891 | GGUUACCACAACACUGGAA | 217 | 3891 | GGUUACCACAACACUGGAA | 217 | 3909 | UUCCAGUGUUGUGGUAACC | 1868 |
| 3909 | AGAAACUAAGUUUCUUACC | 218 | 3909 | AGAAACUAAGUUUCUUACC | 218 | 3927 | GGUAAGAAACUUAGUUUCU | 1869 |
| 3927 | CAAUAAGUUACUCUUGUUU | 219 | 3927 | CAAUAAGUUACUCUUGUUU | 219 | 3945 | AAACAAGAGUAACUUAUUG | 1870 |
| 3945 | UGCUGAUAUCAAUGGUAAG | 220 | 3945 | UGCUGAUAUCAAUGGUAAG | 220 | 3963 | CUUACCAUUGAUAUCAGCA | 1871 |
| 3963 | GCUUUACCAUGAUUCUCAG | 221 | 3963 | GCUUUACCAUGAUUCUCAG | 221 | 3981 | CUGAGAAUCAUGGUAAAGC | 1872 |
| 3981 | GAACAUGCUUAGAGGUGAA | 222 | 3981 | GAACAUGCUUAGAGGUGAA | 222 | 3999 | UUCACCUCUAAGCAUGUUC | 1873 |
| 3999 | AGAUAUGUCUUUCCUUGAG | 223 | 3999 | AGAUAUGUCUUUCCUUGAG | 223 | 4017 | CUCAAGGAAAGACAUAUCU | 1874 |
| 4017 | GAAGGAUGCACCUUACAUG | 224 | 4017 | GAAGGAUGCACCUUACAUG | 224 | 4035 | CAUGUAAGGUGCAUCCUUC | 1875 |
| 4035 | GGUAGGUGAUGUUAUCACU | 225 | 4035 | GGUAGGUGAUGUUAUCACU | 225 | 4053 | AGUGAUAACAUCACCUACC | 1876 |
| 4053 | UAGUGGUGAUAUCACUUGU | 226 | 4053 | UAGUGGUGAUAUCACUUGU | 226 | 4071 | ACAAGUGAUAUCACCACUA | 1877 |
| 4071 | UGUUGUAAUACCCUCCAAA | 227 | 4071 | UGUUGUAAUACCCUCCAAA | 227 | 4089 | UUUGGAGGGUAUUACAACA | 1878 |
| 4089 | AAAGGCUGGUGGCACUACU | 228 | 4089 | AAAGGCUGGUGGCACUACU | 228 | 4107 | AGUAGUGCCACCAGCCUUU | 1879 |
| 4107 | UGAGAUGCUCUCAAGAGCU | 229 | 4107 | UGAGAUGCUCUCAAGAGCU | 229 | 4125 | AGCUCUUGAGAGCAUCUCA | 1880 |
| 4125 | UUUGAAGAAAGUGCCAGUU | 230 | 4125 | UUUGAAGAAAGUGCCAGUU | 230 | 4143 | AACUGGCACUUUCUUCAAA | 1881 |
| 4143 | UGAUGAGUAUAUAACCACG | 231 | 4143 | UGAUGAGUAUAUAACCACG | 231 | 4161 | CGUGGUUAUAUACUCAUCA | 1882 |
| 4161 | GUACCCUGGACAAGGAUGU | 232 | 4161 | GUACCCUGGACAAGGAUGU | 232 | 4179 | ACAUCCUUGUCCAGGGUAC | 1883 |
| 4179 | UGCUGGUUAUACACUUGAG | 233 | 4179 | UGCUGGUUAUACACUUGAG | 233 | 4197 | CUCAAGUGUAUAACCAGCA | 1884 |
| 4197 | GGAAGCUAAGACUGCUCUU | 234 | 4197 | GGAAGCUAAGACUGCUCUU | 234 | 4215 | AAGAGCAGUCUUAGCUUCC | 1885 |
| 4215 | UAAGAAAUGCAAAUCUGCA | 235 | 4215 | UAAGAAAUGCAAAUCUGCA | 235 | 4233 | UGCAGAUUUGCAUUUCUUA | 1886 |
| 4233 | AUUUUAUGUACUACCUUCA | 236 | 4233 | AUUUUAUGUACUACCUUCA | 236 | 4251 | UGAAGGUAGUACAUAAAAU | 1887 |
| 4251 | AGAAGCACCUAAUGCUAAG | 237 | 4251 | AGAAGCACCUAAUGCUAAG | 237 | 4269 | CUUAGCAUUAGGUGCUUCU | 1888 |
| 4269 | GGAAGAGAUUCUAGGAACU | 238 | 4269 | GGAAGAGAUUCUAGGAACU | 238 | 4287 | AGUUCCUAGAAUCUCUUCC | 1889 |
| 4287 | UGUAUCCUGGAAUUUGAGA | 239 | 4287 | UGUAUCCUGGAAUUUGAGA | 239 | 4305 | UCUCAAAUUCCAGGAUACA | 1890 |
| 4305 | AGAAAUGCUUGCUCAUGCU | 240 | 4305 | AGAAAUGCUUGCUCAUGCU | 240 | 4323 | AGCAUGAGCAAGCAUUUCU | 1891 |
| 4323 | UGAAGAGACAAGAAAAUUA | 241 | 4323 | UGAAGAGACAAGAAAAUUA | 241 | 4341 | UAAUUUUCUUGUCUCUUCA | 1892 |
| 4341 | AAUGCCUAUAUGCAUGGAU | 242 | 4341 | AAUGCCUAUAUGCAUGGAU | 242 | 4359 | AUCCAUGCAUAUAGGCAUU | 1893 |
| 4359 | UGUUAGAGCCAUAAUGGCA | 243 | 4359 | UGUUAGAGCCAUAAUGGCA | 243 | 4377 | UGCCAUUAUGGCUCUAACA | 1894 |
| 4377 | AACCAUCCAACGUAAGUAU | 244 | 4377 | AACCAUCCAACGUAAGUAU | 244 | 4395 | AUACUUACGUUGGAUGGUU | 1895 |
| 4395 | UAAAGGAAUUAAAAUUCAA | 245 | 4395 | UAAAGGAAUUAAAAUUCAA | 245 | 4413 | UUGAAUUUUAAUUCCUUUA | 1896 |
| 4413 | AGAGGGCAUCGUUGACUAU | 246 | 4413 | AGAGGGCAUCGUUGACUAU | 246 | 4431 | AUAGUCAACGAUGCCCUCU | 1897 |
| 4431 | UGGUGUCCGAUUCUUCUUU | 247 | 4431 | UGGUGUCCGAUUCUUCUUU | 247 | 4449 | AAAGAAGAAUCGGACACCA | 1898 |
| 4449 | UUAUACUAGUAAAGAGCCU | 248 | 4449 | UUAUACUAGUAAAGAGCCU | 248 | 4467 | AGGCUCUUUACUAGUAUAA | 1899 |
| 4467 | UGUAGCUUCUAUUAUUACG | 249 | 4467 | UGUAGCUUCUAUUAUUACG | 249 | 4485 | CGUAAUAAUAGAAGCUACA | 1900 |
| 4485 | GAAGCUGAACUCUCUAAAU | 250 | 4485 | GAAGCUGAACUCUCUAAAU | 250 | 4503 | AUUUAGAGAGUUCAGCUUC | 1901 |
| 4503 | UGAGCCGCUUGUCACAAUG | 251 | 4503 | UGAGCCGCUUGUCACAAUG | 251 | 4521 | CAUUGUGACAAGCGGCUCA | 1902 |
| 4521 | GCCAAUUGGUUAUGUGACA | 252 | 4521 | GCCAAUUGGUUAUGUGACA | 252 | 4539 | UGUCACAUAACCAAUUGGC | 1903 |
| 4539 | ACAUGGUUUUAAUCUUGAA | 253 | 4539 | ACAUGGUUUUAAUCUUGAA | 253 | 4557 | UUCAAGAUUAAAACCAUGU | 1904 |
| 4557 | AGAGGCUGCGCGCUGUAUG | 254 | 4557 | AGAGGCUGCGCGCUGUAUG | 254 | 4575 | CAUACAGCGCGCAGCCUCU | 1905 |
| 4575 | GCGUUCUCUUAAAGCUCCU | 255 | 4575 | GCGUUCUCUUAAAGCUCCU | 255 | 4593 | AGGAGCUUUAAGAGAACGC | 1906 |
| 4593 | UGCCGUAGUGUCAGUAUCA | 256 | 4593 | UGCCGUAGUGUCAGUAUCA | 256 | 4611 | UGAUACUGACACUACGGCA | 1907 |
| 4611 | AUCACCAGAUGCUGUUACU | 257 | 4611 | AUCACCAGAUGCUGUUACU | 257 | 4629 | AGUAACAGCAUCUGGUGAU | 1908 |
| 4629 | UACAUAUAAUGGAUACCUC | 258 | 4629 | UACAUAUAAUGGAUACCUC | 258 | 4647 | GAGGUAUCCAUUAUAUGUA | 1909 |
| 4647 | CACUUCGUCAUCAAAGACA | 259 | 4647 | CACUUCGUCAUCAAAGACA | 259 | 4665 | UGUCUUUGAUGACGAAGUG | 1910 |
| 4665 | AUCUGAGGAGCACUUUGUA | 260 | 4665 | AUCUGAGGAGCACUUUGUA | 260 | 4683 | UACAAAGUGCUCCUCAGAU | 1911 |
| 4683 | AGAAACAGUUUCUUUGGCU | 261 | 4683 | AGAAACAGUUUCUUUGGCU | 261 | 4701 | AGCCAAAGAAACUGUUUCU | 1912 |
| 4701 | UGGCUCUUACAGAGAUUGG | 262 | 4701 | UGGCUCUUACAGAGAUUGG | 262 | 4719 | CCAAUCUCUGUAAGAGCCA | 1913 |
| 4719 | GUCCUAUUCAGGACAGCGU | 263 | 4719 | GUCCUAUUCAGGACAGCGU | 263 | 4737 | ACGCUGUCCUGAAUAGGAC | 1914 |
| 4737 | UACAGAGUUAGGUGUUGAA | 264 | 4737 | UACAGAGUUAGGUGUUGAA | 264 | 4755 | UUCAACACCUAACUCUGUA | 1915 |
| 4755 | AUUUCUUAAGCGUGGUGAC | 265 | 4755 | AUUUCUUAAGCGUGGUGAC | 265 | 4773 | GUCACCACGCUUAAGAAAU | 1916 |
| 4773 | CAAAAUUGUGUACCACACU | 266 | 4773 | CAAAAUUGUGUACCACACU | 266 | 4791 | AGUGUGGUACACAAUUUUG | 1917 |
| 4791 | UCUGGAGAGCCCCGUCGAG | 267 | 4791 | UCUGGAGAGCCCCGUCGAG | 267 | 4809 | CUCGACGGGGCUCUCCAGA | 1918 |
| 4809 | GUUUCAUCUUGACGGUGAG | 268 | 4809 | GUUUCAUCUUGACGGUGAG | 268 | 4827 | CUCACCGUCAAGAUGAAAC | 1919 |
| 4827 | GGUUCUUUCACUUGACAAA | 269 | 4827 | GGUUCUUUCACUUGACAAA | 269 | 4845 | UUUGUCAAGUGAAAGAACC | 1920 |
| 4845 | ACUAAAGAGUCUCUUAUCC | 270 | 4845 | ACUAAAGAGUCUCUUAUCC | 270 | 4863 | GGAUAAGAGACUCUUUAGU | 1921 |
| 4863 | CCUGCGGGAGGUUAAGACU | 271 | 4863 | CCUGCGGGAGGUUAAGACU | 271 | 4881 | AGUCUUAACCUCCCGCAGG | 1922 |
| 4881 | UAUAAAAGUGUUCACAACU | 272 | 4881 | UAUAAAAGUGUUCACAACU | 272 | 4899 | AGUUGUGAACACUUUUAUA | 1923 |
| 4899 | UGUGGACAACACUAAUCUC | 273 | 4899 | UGUGGACAACACUAAUCUC | 273 | 4917 | GAGAUUAGUGUUGUCCACA | 1924 |
| 4917 | CCACACACAGCUUGUGGAU | 274 | 4917 | CCACACACAGCUUGUGGAU | 274 | 4935 | AUCCACAAGCUGUGUGUGG | 1925 |
| 4935 | UAUGUCUAUGACAUAUGGA | 275 | 4935 | UAUGUCUAUGACAUAUGGA | 275 | 4953 | UCCAUAUGUCAUAGACAUA | 1926 |
| 4953 | ACAGCAGUUUGGUCCAACA | 276 | 4953 | ACAGCAGUUUGGUCCAACA | 276 | 4971 | UGUUGGACCAAACUGCUGU | 1927 |
| 4971 | AUACUUGGAUGGUGCUGAU | 277 | 4971 | AUACUUGGAUGGUGCUGAU | 277 | 4989 | AUCAGCACCAUCCAAGUAU | 1928 |
| 4989 | UGUUACAAAAAUUAAACCU | 278 | 4989 | UGUUACAAAAAUUAAACCU | 278 | 5007 | AGGUUUAAUUUUUGUAACA | 1929 |
| 5007 | UCAUGUAAAUCAUGAGGGU | 279 | 5007 | UCAUGUAAAUCAUGAGGGU | 279 | 5025 | ACCCUCAUGAUUUACAUGA | 1930 |
| 5025 | UAAGACUUUCUUUGUACUA | 280 | 5025 | UAAGACUUUCUUUGUACUA | 280 | 5043 | UAGUACAAAGAAAGUCUUA | 1931 |
| 5043 | ACCUAGUGAUGACACACUA | 281 | 5043 | ACCUAGUGAUGACACACUA | 281 | 5061 | UAGUGUGUCAUCACUAGGU | 1932 |
| 5061 | ACGUAGUGAAGCUUUCGAG | 282 | 5061 | ACGUAGUGAAGCUUUCGAG | 282 | 5079 | CUCGAAAGCUUCACUACGU | 1933 |
| 5079 | GUACUACCAUACUCUUGAU | 283 | 5079 | GUACUACCAUACUCUUGAU | 283 | 5097 | AUCAAGAGUAUGGUAGUAC | 1934 |
| 5097 | UGAGAGUUUUCUUGGUAGG | 284 | 5097 | UGAGAGUUUUCUUGGUAGG | 284 | 5115 | CCUACCAAGAAAACUCUCA | 1935 |
| 5115 | GUACAUGUCUGCUUUAAAC | 285 | 5115 | GUACAUGUCUGCUUUAAAC | 285 | 5133 | GUUUAAAGCAGACAUGUAC | 1936 |
| 5133 | CCACACAAAGAAAUGGAAA | 286 | 5133 | CCACACAAAGAAAUGGAAA | 286 | 5151 | UUUCCAUUUCUUUGUGUGG | 1937 |
| 5151 | AUUUCCUCAAGUUGGUGGU | 287 | 5151 | AUUUCCUCAAGUUGGUGGU | 287 | 5169 | ACCACCAACUUGAGGAAAU | 1938 |
| 5169 | UUUAACUUCAAUUAAAUGG | 288 | 5169 | UUUAACUUCAAUUAAAUGG | 288 | 5187 | CCAUUUAAUUGAAGUUAAA | 1939 |
| 5187 | GGCUGAUAACAAUUGUUAU | 289 | 5187 | GGCUGAUAACAAUUGUUAU | 289 | 5205 | AUAACAAUUGUUAUCAGCC | 1940 |
| 5205 | UUUGUCUAGUGUUUUAUUA | 290 | 5205 | UUUGUCUAGUGUUUUAUUA | 290 | 5223 | UAAUAAAACACUAGACAAA | 1941 |
| 5223 | AGCACUUCAACAGCUUGAA | 291 | 5223 | AGCACUUCAACAGCUUGAA | 291 | 5241 | UUCAAGCUGUUGAAGUGCU | 1942 |
| 5241 | AGUCAAAUUCAAUGCACCA | 292 | 5241 | AGUCAAAUUCAAUGCACCA | 292 | 5259 | UGGUGCAUUGAAUUUGACU | 1943 |
| 5259 | AGCACUUCAAGAGGCUUAU | 293 | 5259 | AGCACUUCAAGAGGCUUAU | 293 | 5277 | AUAAGCCUCUUGAAGUGCU | 1944 |
| 5277 | UUAUAGAGCCCGUGCUGGU | 294 | 5277 | UUAUAGAGCCCGUGCUGGU | 294 | 5295 | ACCAGCACGGGCUCUAUAA | 1945 |
| 5295 | UGAUGCUGCUAACUUUUGU | 295 | 5295 | UGAUGCUGCUAACUUUUGU | 295 | 5313 | ACAAAAGUUAGCAGCAUCA | 1946 |
| 5313 | UGCACUCAUACUCGCUUAC | 296 | 5313 | UGCACUCAUACUCGCUUAC | 296 | 5331 | GUAAGCGAGUAUGAGUGCA | 1947 |
| 5331 | CAGUAAUAAAACUGUUGGC | 297 | 5331 | CAGUAAUAAAACUGUUGGC | 297 | 5349 | GCCAACAGUUUUAUUACUG | 1948 |
| 5349 | CGAGCUUGGUGAUGUCAGA | 298 | 5349 | CGAGCUUGGUGAUGUCAGA | 298 | 5367 | UCUGACAUCACCAAGCUCG | 1949 |
| 5367 | AGAAACUAUGACCCAUCUU | 299 | 5367 | AGAAACUAUGACCCAUCUU | 299 | 5385 | AAGAUGGGUCAUAGUUUCU | 1950 |
| 5385 | UCUACAGCAUGCUAAUUUG | 300 | 5385 | UCUACAGCAUGCUAAUUUG | 300 | 5403 | CAAAUUAGCAUGCUGUAGA | 1951 |
| 5403 | GGAAUCUGCAAAGCGAGUU | 301 | 5403 | GGAAUCUGCAAAGCGAGUU | 301 | 5421 | AACUCGCUUUGCAGAUUCC | 1952 |
| 5421 | UCUUAAUGUGGUGUGUAAA | 302 | 5421 | UCUUAAUGUGGUGUGUAAA | 302 | 5439 | UUUACACACCACAUUAAGA | 1953 |
| 5439 | ACAUUGUGGUCAGAAAACU | 303 | 5439 | ACAUUGUGGUCAGAAAACU | 303 | 5457 | AGUUUUCUGACCACAAUGU | 1954 |
| 5457 | UACUACCUUAACGGGUGUA | 304 | 5457 | UACUACCUUAACGGGUGUA | 304 | 5475 | UACACCCGUUAAGGUAGUA | 1955 |
| 5475 | AGAAGCUGUGAUGUAUAUG | 305 | 5475 | AGAAGCUGUGAUGUAUAUG | 305 | 5493 | CAUAUACAUCACAGCUUCU | 1956 |
| 5493 | GGGUACUCUAUCUUAUGAU | 306 | 5493 | GGGUACUCUAUCUUAUGAU | 306 | 5511 | AUCAUAAGAUAGAGUACCC | 1957 |
| 5511 | UAAUCUUAAGACAGGUGUU | 307 | 5511 | UAAUCUUAAGACAGGUGUU | 307 | 5529 | AACACCUGUCUUAAGAUUA | 1958 |
| 5529 | UUCCAUUCCAUGUGUGUGU | 308 | 5529 | UUCCAUUCCAUGUGUGUGU | 308 | 5547 | ACACACACAUGGAAUGGAA | 1959 |
| 5547 | UGGUCGUGAUGCUACACAA | 309 | 5547 | UGGUCGUGAUGCUACACAA | 309 | 5565 | UUGUGUAGCAUCACGACCA | 1960 |
| 5565 | AUAUCUAGUACAACAAGAG | 310 | 5565 | AUAUCUAGUACAACAAGAG | 310 | 5583 | CUCUUGUUGUACUAGAUAU | 1961 |
| 5583 | GUCUUCUUUUGUUAUGAUG | 311 | 5583 | GUCUUCUUUUGUUAUGAUG | 311 | 5601 | CAUCAUAACAAAAGAAGAC | 1962 |
| 5601 | GUCUGCACCACCUGCUGAG | 312 | 5601 | GUCUGCACCACCUGCUGAG | 312 | 5619 | CUCAGCAGGUGGUGCAGAC | 1963 |
| 5619 | GUAUAAAUUACAGCAAGGU | 313 | 5619 | GUAUAAAUUACAGCAAGGU | 313 | 5637 | ACCUUGCUGUAAUUUAUAC | 1964 |
| 5637 | UACAUUCUUAUGUGCGAAU | 314 | 5637 | UACAUUCUUAUGUGCGAAU | 314 | 5655 | AUUCGCACAUAAGAAUGUA | 1965 |
| 5655 | UGAGUACACUGGUAACUAU | 315 | 5655 | UGAGUACACUGGUAACUAU | 315 | 5673 | AUAGUUACCAGUGUACUCA | 1966 |
| 5673 | UCAGUGUGGUCAUUACACU | 316 | 5673 | UCAGUGUGGUCAUUACACU | 316 | 5691 | AGUGUAAUGACCACACUGA | 1967 |
| 5691 | UCAUAUAACUGCUAAGGAG | 317 | 5691 | UCAUAUAACUGCUAAGGAG | 317 | 5709 | CUCCUUAGCAGUUAUAUGA | 1968 |
| 5709 | GACCCUCUAUCGUAUUGAC | 318 | 5709 | GACCCUCUAUCGUAUUGAC | 318 | 5727 | GUCAAUACGAUAGAGGGUC | 1969 |
| 5727 | CGGAGCUCACCUUACAAAG | 319 | 5727 | CGGAGCUCACCUUACAAAG | 319 | 5745 | CUUUGUAAGGUGAGCUCCG | 1970 |
| 5745 | GAUGUCAGAGUACAAAGGA | 320 | 5745 | GAUGUCAGAGUACAAAGGA | 320 | 5763 | UCCUUUGUACUCUGACAUC | 1971 |
| 5763 | ACCAGUGACUGAUGUUUUC | 321 | 5763 | ACCAGUGACUGAUGUUUUC | 321 | 5781 | GAAAACAUCAGUCACUGGU | 1972 |
| 5781 | CUACAAGGAAACAUCUUAC | 322 | 5781 | CUACAAGGAAACAUCUUAC | 322 | 5799 | GUAAGAUGUUUCCUUGUAG | 1973 |
| 5799 | CACUACAACCAUCAAGCCU | 323 | 5799 | CACUACAACCAUCAAGCCU | 323 | 5817 | AGGCUUGAUGGUUGUAGUG | 1974 |
| 5817 | UGUGUCGUAUAAACUCGAU | 324 | 5817 | UGUGUCGUAUAAACUCGAU | 324 | 5835 | AUCGAGUUUAUACGACACA | 1975 |
| 5835 | UGGAGUUACUUACACAGAG | 325 | 5835 | UGGAGUUACUUACACAGAG | 325 | 5853 | CUCUGUGUAAGUAACUCCA | 1976 |
| 5853 | GAUUGAACCAAAAUUGGAU | 326 | 5853 | GAUUGAACCAAAAUUGGAU | 326 | 5871 | AUCCAAUUUUGGUUCAAUC | 1977 |
| 5871 | UGGGUAUUAUAAAAAGGAU | 327 | 5871 | UGGGUAUUAUAAAAAGGAU | 327 | 5889 | AUCCUUUUUAUAAUACCCA | 1978 |
| 5889 | UAAUGCUUACUAUACAGAG | 328 | 5889 | UAAUGCUUACUAUACAGAG | 328 | 5907 | CUCUGUAUAGUAAGCAUUA | 1979 |
| 5907 | GCAGCCUAUAGACCUUGUA | 329 | 5907 | GCAGCCUAUAGACCUUGUA | 329 | 5925 | UACAAGGUCUAUAGGCUGC | 1980 |
| 5925 | ACCAACUCAACCAUUACCA | 330 | 5925 | ACCAACUCAACCAUUACCA | 330 | 5943 | UGGUAAUGGUUGAGUUGGU | 1981 |
| 5943 | AAAUGCGAGUUUUGAUAAU | 331 | 5943 | AAAUGCGAGUUUUGAUAAU | 331 | 5961 | AUUAUCAAAACUCGCAUUU | 1982 |
| 5961 | UUUCAAACUCACAUGUUCU | 332 | 5961 | UUUCAAACUCACAUGUUCU | 332 | 5979 | AGAACAUGUGAGUUUGAAA | 1983 |
| 5979 | UAACACAAAAUUUGCUGAU | 333 | 5979 | UAACACAAAAUUUGCUGAU | 333 | 5997 | AUCAGCAAAUUUUGUGUUA | 1984 |
| 5997 | UGAUUUAAAUCAAAUGACA | 334 | 5997 | UGAUUUAAAUCAAAUGACA | 334 | 6015 | UGUCAUUUGAUUUAAAUCA | 1985 |
| 6015 | AGGCUUCACAAAGCCAGCU | 335 | 6015 | AGGCUUCACAAAGCCAGCU | 335 | 6033 | AGCUGGCUUUGUGAAGCCU | 1986 |
| 6033 | UUCACGAGAGCUAUCUGUC | 336 | 6033 | UUCACGAGAGCUAUCUGUC | 336 | 6051 | GACAGAUAGCUCUCGUGAA | 1987 |
| 6051 | CACAUUCUUCCCAGACUUG | 337 | 6051 | CACAUUCUUCCCAGACUUG | 337 | 6069 | CAAGUCUGGGAAGAAUGUG | 1988 |
| 6069 | GAAUGGCGAUGUAGUGGCU | 338 | 6069 | GAAUGGCGAUGUAGUGGCU | 338 | 6087 | AGCCACUACAUCGCCAUUC | 1989 |
| 6087 | UAUUGACUAUAGACACUAU | 339 | 6087 | UAUUGACUAUAGACACUAU | 339 | 6105 | AUAGUGUCUAUAGUCAAUA | 1990 |
| 6105 | UUCAGCGAGUUUCAAGAAA | 340 | 6105 | UUCAGCGAGUUUCAAGAAA | 340 | 6123 | UUUCUUGAAACUCGCUGAA | 1991 |
| 6123 | AGGUGCUAAAUUACUGCAU | 341 | 6123 | AGGUGCUAAAUUACUGCAU | 341 | 6141 | AUGCAGUAAUUUAGCACCU | 1992 |
| 6141 | UAAGCCAAUUGUUUGGCAC | 342 | 6141 | UAAGCCAAUUGUUUGGCAC | 342 | 6159 | GUGCCAAACAAUUGGCUUA | 1993 |
| 6159 | CAUUAACCAGGCUACAACC | 343 | 6159 | CAUUAACCAGGCUACAACC | 343 | 6177 | GGUUGUAGCCUGGUUAAUG | 1994 |
| 6177 | CAAGACAACGUUCAAACCA | 344 | 6177 | CAAGACAACGUUCAAACCA | 344 | 6195 | UGGUUUGAACGUUGUCUUG | 1995 |
| 6195 | AAACACUUGGUGUUUACGU | 345 | 6195 | AAACACUUGGUGUUUACGU | 345 | 6213 | ACGUAAACACCAAGUGUUU | 1996 |
| 6213 | UUGUCUUUGGAGUACAAAG | 346 | 6213 | UUGUCUUUGGAGUACAAAG | 346 | 6231 | CUUUGUACUCCAAAGACAA | 1997 |
| 6231 | GCCAGUAGAUACUUCAAAU | 347 | 6231 | GCCAGUAGAUACUUCAAAU | 347 | 6249 | AUUUGAAGUAUCUACUGGC | 1998 |
| 6249 | UUCAUUUGAAGUUCUGGCA | 348 | 6249 | UUCAUUUGAAGUUCUGGCA | 348 | 6267 | UGCCAGAACUUCAAAUGAA | 1999 |
| 6267 | AGUAGAAGACACACAAGGA | 349 | 6267 | AGUAGAAGACACACAAGGA | 349 | 6285 | UCCUUGUGUGUCUUCUACU | 2000 |
| 6285 | AAUGGACAAUCUUGCUUGU | 350 | 6285 | AAUGGACAAUCUUGCUUGU | 350 | 6303 | ACAAGCAAGAUUGUCCAUU | 2001 |
| 6303 | UGAAAGUCAACAACCCACC | 351 | 6303 | UGAAAGUCAACAACCCACC | 351 | 6321 | GGUGGGUUGUUGACUUUCA | 2002 |
| 6321 | CUCUGAAGAAGUAGUGGAA | 352 | 6321 | CUCUGAAGAAGUAGUGGAA | 352 | 6339 | UUCCACUACUUCUUCAGAG | 2003 |
| 6339 | AAAUCCUACCAUACAGAAG | 353 | 6339 | AAAUCCUACCAUACAGAAG | 353 | 6357 | CUUCUGUAUGGUAGGAUUU | 2004 |
| 6357 | GGAAGUCAUAGAGUGUGAC | 354 | 6357 | GGAAGUCAUAGAGUGUGAC | 354 | 6375 | GUCACACUCUAUGACUUCC | 2005 |
| 6375 | CGUGAAAACUACCGAAGUU | 355 | 6375 | CGUGAAAACUACCGAAGUU | 355 | 6393 | AACUUCGGUAGUUUUCACG | 2006 |
| 6393 | UGUAGGCAAUGUCAUACUU | 356 | 6393 | UGUAGGCAAUGUCAUACUU | 356 | 6411 | AAGUAUGACAUUGCCUACA | 2007 |
| 6411 | UAAACCAUCAGAUGAAGGU | 357 | 6411 | UAAACCAUCAGAUGAAGGU | 357 | 6429 | ACCUUCAUCUGAUGGUUUA | 2008 |
| 6429 | UGUUAAAGUAACACAAGAG | 358 | 6429 | UGUUAAAGUAACACAAGAG | 358 | 6447 | CUCUUGUGUUACUUUAACA | 2009 |
| 6447 | GUUAGGUCAUGAGGAUCUU | 359 | 6447 | GUUAGGUCAUGAGGAUCUU | 359 | 6465 | AAGAUCCUCAUGACCUAAC | 2010 |
| 6465 | UAUGGCUGCUUAUGUGGAA | 360 | 6465 | UAUGGCUGCUUAUGUGGAA | 360 | 6483 | UUCCACAUAAGCAGCCAUA | 2011 |
| 6483 | AAACACAAGCAUUACCAUU | 361 | 6483 | AAACACAAGCAUUACCAUU | 361 | 6501 | AAUGGUAAUGCUUGUGUUU | 2012 |
| 6501 | UAAGAAACCUAAUGAGCUU | 362 | 6501 | UAAGAAACCUAAUGAGCUU | 362 | 6519 | AAGCUCAUUAGGUUUCUUA | 2013 |
| 6519 | UUCACUAGCCUUAGGUUUA | 363 | 6519 | UUCACUAGCCUUAGGUUUA | 363 | 6537 | UAAACCUAAGGCUAGUGAA | 2014 |
| 6537 | AAAAACAAUUGCCACUCAU | 364 | 6537 | AAAAACAAUUGCCACUCAU | 364 | 6555 | AUGAGUGGCAAUUGUUUUU | 2015 |
| 6555 | UGGUAUUGCUGCAAUUAAU | 365 | 6555 | UGGUAUUGCUGCAAUUAAU | 365 | 6573 | AUUAAUUGCAGCAAUACCA | 2016 |
| 6573 | UAGUGUUCCUUGGAGUAAA | 366 | 6573 | UAGUGUUCCUUGGAGUAAA | 366 | 6591 | UUUACUCCAAGGAACACUA | 2017 |
| 6591 | AAUUUUGGCUUAUGUCAAA | 367 | 6591 | AAUUUUGGCUUAUGUCAAA | 367 | 6609 | UUUGACAUAAGCCAAAAUU | 2018 |
| 6609 | ACCAUUCUUAGGACAAGCA | 368 | 6609 | ACCAUUCUUAGGACAAGCA | 368 | 6627 | UGCUUGUCCUAAGAAUGGU | 2019 |
| 6627 | AGCAAUUACAACAUCAAAU | 369 | 6627 | AGCAAUUACAACAUCAAAU | 369 | 6645 | AUUUGAUGUUGUAAUUGCU | 2020 |
| 6645 | UUGCGCUAAGAGAUUAGCA | 370 | 6645 | UUGCGCUAAGAGAUUAGCA | 370 | 6663 | UGCUAAUCUCUUAGCGCAA | 2021 |
| 6663 | ACAACGUGUGUUUAACAAU | 371 | 6663 | ACAACGUGUGUUUAACAAU | 371 | 6681 | AUUGUUAAACACACGUUGU | 2022 |
| 6681 | UUAUAUGCCUUAUGUGUUU | 372 | 6681 | UUAUAUGCCUUAUGUGUUU | 372 | 6699 | AAACACAUAAGGCAUAUAA | 2023 |
| 6699 | UACAUUAUUGUUCCAAUUG | 373 | 6699 | UACAUUAUUGUUCCAAUUG | 373 | 6717 | CAAUUGGAACAAUAAUGUA | 2024 |
| 6717 | GUGUACUUUUACUAAAAGU | 374 | 6717 | GUGUACUUUUACUAAAAGU | 374 | 6735 | ACUUUUAGUAAAAGUACAC | 2025 |
| 6735 | UACCAAUUCUAGAAUUAGA | 375 | 6735 | UACCAAUUCUAGAAUUAGA | 375 | 6753 | UCUAAUUCUAGAAUUGGUA | 2026 |
| 6753 | AGCUUCACUACCUACAACU | 376 | 6753 | AGCUUCACUACCUACAACU | 376 | 6771 | AGUUGUAGGUAGUGAAGCU | 2027 |
| 6771 | UAUUGCUAAAAAUAGUGUU | 377 | 6771 | UAUUGCUAAAAAUAGUGUU | 377 | 6789 | AACACUAUUUUUAGCAAUA | 2028 |
| 6789 | UAAGAGUGUUGCUAAAUUA | 378 | 6789 | UAAGAGUGUUGCUAAAUUA | 378 | 6807 | UAAUUUAGCAACACUCUUA | 2029 |
| 6807 | AUGUUUGGAUGCCGGCAUU | 379 | 6807 | AUGUUUGGAUGCCGGCAUU | 379 | 6825 | AAUGCCGGCAUCCAAACAU | 2030 |
| 6825 | UAAUUAUGUGAAGUCACCC | 380 | 6825 | UAAUUAUGUGAAGUCACCC | 380 | 6843 | GGGUGACUUCACAUAAUUA | 2031 |
| 6843 | CAAAUUUUCUAAAUUGUUC | 381 | 6843 | CAAAUUUUCUAAAUUGUUC | 381 | 6861 | GAACAAUUUAGAAAAUUUG | 2032 |
| 6861 | CACAAUCGCUAUGUGGCUA | 382 | 6861 | CACAAUCGCUAUGUGGCUA | 382 | 6879 | UAGCCACAUAGCGAUUGUG | 2033 |
| 6879 | AUUGUUGUUAAGUAUUUGC | 383 | 6879 | AUUGUUGUUAAGUAUUUGC | 383 | 6897 | GCAAAUACUUAACAACAAU | 2034 |
| 6897 | CUUAGGUUCUCUAAUCUGU | 384 | 6897 | CUUAGGUUCUCUAAUCUGU | 384 | 6915 | ACAGAUUAGAGAACCUAAG | 2035 |
| 6915 | UGUAACUGCUGCUUUUGGU | 385 | 6915 | UGUAACUGCUGCUUUUGGU | 385 | 6933 | ACCAAAAGCAGCAGUUACA | 2036 |
| 6933 | UGUACUCUUAUCUAAUUUU | 386 | 6933 | UGUACUCUUAUCUAAUUUU | 386 | 6951 | AAAAUUAGAUAAGAGUACA | 2037 |
| 6951 | UGGUGCUCCUUCUUAUUGU | 387 | 6951 | UGGUGCUCCUUCUUAUUGU | 387 | 6969 | ACAAUAAGAAGGAGCACCA | 2038 |
| 6969 | UAAUGGCGUUAGAGAAUUG | 388 | 6969 | UAAUGGCGUUAGAGAAUUG | 388 | 6987 | CAAUUCUCUAACGCCAUUA | 2039 |
| 6987 | GUAUCUUAAUUCGUCUAAC | 389 | 6987 | GUAUCUUAAUUCGUCUAAC | 389 | 7005 | GUUAGACGAAUUAAGAUAC | 2040 |
| 7005 | CGUUACUACUAUGGAUUUC | 390 | 7005 | CGUUACUACUAUGGAUUUC | 390 | 7023 | GAAAUCCAUAGUAGUAACG | 2041 |
| 7023 | CUGUGAAGGUUCUUUUCCU | 391 | 7023 | CUGUGAAGGUUCUUUUCCU | 391 | 7041 | AGGAAAAGAACCUUCACAG | 2042 |
| 7041 | UUGCAGCAUUUGUUUAAGU | 392 | 7041 | UUGCAGCAUUUGUUUAAGU | 392 | 7059 | ACUUAAACAAAUGCUGCAA | 2043 |
| 7059 | UGGAUUAGACUCCCUUGAU | 393 | 7059 | UGGAUUAGACUCCCUUGAU | 393 | 7077 | AUCAAGGGAGUCUAAUCCA | 2044 |
| 7077 | UUCUUAUCCAGCUCUUGAA | 394 | 7077 | UUCUUAUCCAGCUCUUGAA | 394 | 7095 | UUCAAGAGCUGGAUAAGAA | 2045 |
| 7095 | AACCAUUCAGGUGACGAUU | 395 | 7095 | AACCAUUCAGGUGACGAUU | 395 | 7113 | AAUCGUCACCUGAAUGGUU | 2046 |
| 7113 | UUCAUCGUACAAGCUAGAC | 396 | 7113 | UUCAUCGUACAAGCUAGAC | 396 | 7131 | GUCUAGCUUGUACGAUGAA | 2047 |
| 7131 | CUUGACAAUUUUAGGUCUG | 397 | 7131 | CUUGACAAUUUUAGGUCUG | 397 | 7149 | CAGACCUAAAAUUGUCAAG | 2048 |
| 7149 | GGCCGCUGAGUGGGUUUUG | 398 | 7149 | GGCCGCUGAGUGGGUUUUG | 398 | 7167 | CAAAACCCACUCAGCGGCC | 2049 |
| 7167 | GGCAUAUAUGUUGUUCACA | 399 | 7167 | GGCAUAUAUGUUGUUCACA | 399 | 7185 | UGUGAACAACAUAUAUGCC | 2050 |
| 7185 | AAAAUUCUUUUAUUUAUUA | 400 | 7185 | AAAAUUCUUUUAUUUAUUA | 400 | 7203 | UAAUAAAUAAAAGAAUUUU | 2051 |
| 7203 | AGGUCUUUCAGCUAUAAUG | 401 | 7203 | AGGUCUUUCAGCUAUAAUG | 401 | 7221 | CAUUAUAGCUGAAAGACCU | 2052 |
| 7221 | GCAGGUGUUCUUUGGCUAU | 402 | 7221 | GCAGGUGUUCUUUGGCUAU | 402 | 7239 | AUAGCCAAAGAACACCUGC | 2053 |
| 7239 | UUUUGCUAGUCAUUUCAUC | 403 | 7239 | UUUUGCUAGUCAUUUCAUC | 403 | 7257 | GAUGAAAUGACUAGCAAAA | 2054 |
| 7257 | CAGCAAUUCUUGGCUCAUG | 404 | 7257 | CAGCAAUUCUUGGCUCAUG | 404 | 7275 | CAUGAGCCAAGAAUUGCUG | 2055 |
| 7275 | GUGGUUUAUCAUUAGUAUU | 405 | 7275 | GUGGUUUAUCAUUAGUAUU | 405 | 7293 | AAUACUAAUGAUAAACCAC | 2056 |
| 7293 | UGUACAAAUGGCACCCGUU | 406 | 7293 | UGUACAAAUGGCACCCGUU | 406 | 7311 | AACGGGUGCCAUUUGUACA | 2057 |
| 7311 | UUCUGCAAUGGUUAGGAUG | 407 | 7311 | UUCUGCAAUGGUUAGGAUG | 407 | 7329 | CAUCCUAACCAUUGCAGAA | 2058 |
| 7329 | GUACAUCUUCUUUGCUUCU | 408 | 7329 | GUACAUCUUCUUUGCUUCU | 408 | 7347 | AGAAGCAAAGAAGAUGUAC | 2059 |
| 7347 | UUUCUACUACAUAUGGAAG | 409 | 7347 | UUUCUACUACAUAUGGAAG | 409 | 7365 | CUUCCAUAUGUAGUAGAAA | 2060 |
| 7365 | GAGCUAUGUUCAUAUCAUG | 410 | 7365 | GAGCUAUGUUCAUAUCAUG | 410 | 7383 | CAUGAUAUGAACAUAGCUC | 2061 |
| 7383 | GGAUGGUUGCACCUCUUCG | 411 | 7383 | GGAUGGUUGCACCUCUUCG | 411 | 7401 | CGAAGAGGUGCAACCAUCC | 2062 |
| 7401 | GACUUGCAUGAUGUGCUAU | 412 | 7401 | GACUUGCAUGAUGUGCUAU | 412 | 7419 | AUAGCACAUCAUGCAAGUC | 2063 |
| 7419 | UAAGCGCAAUCGUGCCACA | 413 | 7419 | UAAGCGCAAUCGUGCCACA | 413 | 7437 | UGUGGCACGAUUGCGCUUA | 2064 |
| 7437 | ACGCGUUGAGUGUACAACU | 414 | 7437 | ACGCGUUGAGUGUACAACU | 414 | 7455 | AGUUGUACACUCAACGCGU | 2065 |
| 7455 | UAUUGUUAAUGGCAUGAAG | 415 | 7455 | UAUUGUUAAUGGCAUGAAG | 415 | 7473 | CUUCAUGCCAUUAACAAUA | 2066 |
| 7473 | GAGAUCUUUCUAUGUCUAU | 416 | 7473 | GAGAUCUUUCUAUGUCUAU | 416 | 7491 | AUAGACAUAGAAAGAUCUC | 2067 |
| 7491 | UGCAAAUGGAGGCCGUGGC | 417 | 7491 | UGCAAAUGGAGGCCGUGGC | 417 | 7509 | GCCACGGCCUCCAUUUGCA | 2068 |
| 7509 | CUUCUGCAAGACUCACAAU | 418 | 7509 | CUUCUGCAAGACUCACAAU | 418 | 7527 | AUUGUGAGUCUUGCAGAAG | 2069 |
| 7527 | UUGGAAUUGUCUCAAUUGU | 419 | 7527 | UUGGAAUUGUCUCAAUUGU | 419 | 7545 | ACAAUUGAGACAAUUCCAA | 2070 |
| 7545 | UGACACAUUUUGCACUGGU | 420 | 7545 | UGACACAUUUUGCACUGGU | 420 | 7563 | ACCAGUGCAAAAUGUGUCA | 2071 |
| 7563 | UAGUACAUUCAUUAGUGAU | 421 | 7563 | UAGUACAUUCAUUAGUGAU | 421 | 7581 | AUCACUAAUGAAUGUACUA | 2072 |
| 7581 | UGAAGUUGCUCGUGAUUUG | 422 | 7581 | UGAAGUUGCUCGUGAUUUG | 422 | 7599 | CAAAUCACGAGCAACUUCA | 2073 |
| 7599 | GUCACUCCAGUUUAAAAGA | 423 | 7599 | GUCACUCCAGUUUAAAAGA | 423 | 7617 | UCUUUUAAACUGGAGUGAC | 2074 |
| 7617 | ACCAAUCAACCCUACUGAC | 424 | 7617 | ACCAAUCAACCCUACUGAC | 424 | 7635 | GUCAGUAGGGUUGAUUGGU | 2075 |
| 7635 | CCAGUCAUCGUAUAUUGUU | 425 | 7635 | CCAGUCAUCGUAUAUUGUU | 425 | 7653 | AACAAUAUACGAUGACUGG | 2076 |
| 7653 | UGAUAGUGUUGCUGUGAAA | 426 | 7653 | UGAUAGUGUUGCUGUGAAA | 426 | 7671 | UUUCACAGCAACACUAUCA | 2077 |
| 7671 | AAAUGGCGCGCUUCACCUC | 427 | 7671 | AAAUGGCGCGCUUCACCUC | 427 | 7689 | GAGGUGAAGCGCGCCAUUU | 2078 |
| 7689 | CUACUUUGACAAGGCUGGU | 428 | 7689 | CUACUUUGACAAGGCUGGU | 428 | 7707 | ACCAGCCUUGUCAAAGUAG | 2079 |
| 7707 | UCAAAAGACCUAUGAGAGA | 429 | 7707 | UCAAAAGACCUAUGAGAGA | 429 | 7725 | UCUCUCAUAGGUCUUUUGA | 2080 |
| 7725 | ACAUCCGCUCUCCCAUUUU | 430 | 7725 | ACAUCCGCUCUCCCAUUUU | 430 | 7743 | AAAAUGGGAGAGCGGAUGU | 2081 |
| 7743 | UGUCAAUUUAGACAAUUUG | 431 | 7743 | UGUCAAUUUAGACAAUUUG | 431 | 7761 | CAAAUUGUCUAAAUUGACA | 2082 |
| 7761 | GAGAGCUAACAACACUAAA | 432 | 7761 | GAGAGCUAACAACACUAAA | 432 | 7779 | UUUAGUGUUGUUAGCUCUC | 2083 |
| 7779 | AGGUUCACUGCCUAUUAAU | 433 | 7779 | AGGUUCACUGCCUAUUAAU | 433 | 7797 | AUUAAUAGGCAGUGAACCU | 2084 |
| 7797 | UGUCAUAGUUUUUGAUGGC | 434 | 7797 | UGUCAUAGUUUUUGAUGGC | 434 | 7815 | GCCAUCAAAAACUAUGACA | 2085 |
| 7815 | CAAGUCCAAAUGCGACGAG | 435 | 7815 | CAAGUCCAAAUGCGACGAG | 435 | 7833 | CUCGUCGCAUUUGGACUUG | 2086 |
| 7833 | GUCUGCUUCUAAGUCUGCU | 436 | 7833 | GUCUGCUUCUAAGUCUGCU | 436 | 7851 | AGCAGACUUAGAAGCAGAC | 2087 |
| 7851 | UUCUGUGUACUACAGUCAG | 437 | 7851 | UUCUGUGUACUACAGUCAG | 437 | 7869 | CUGACUGUAGUACACAGAA | 2088 |
| 7869 | GCUGAUGUGCCAACCUAUU | 438 | 7869 | GCUGAUGUGCCAACCUAUU | 438 | 7887 | AAUAGGUUGGCACAUCAGC | 2089 |
| 7887 | UCUGUUGCUUGACCAAGCU | 439 | 7887 | UCUGUUGCUUGACCAAGCU | 439 | 7905 | AGCUUGGUCAAGCAACAGA | 2090 |
| 7905 | UCUUGUAUCAGACGUUGGA | 440 | 7905 | UCUUGUAUCAGACGUUGGA | 440 | 7923 | UCCAACGUCUGAUACAAGA | 2091 |
| 7923 | AGAUAGUACUGAAGUUUCC | 441 | 7923 | AGAUAGUACUGAAGUUUCC | 441 | 7941 | GGAAACUUCAGUACUAUCU | 2092 |
| 7941 | CGUUAAGAUGUUUGAUGCU | 442 | 7941 | CGUUAAGAUGUUUGAUGCU | 442 | 7959 | AGCAUCAAACAUCUUAACG | 2093 |
| 7959 | UUAUGUCGACACCUUUUCA | 443 | 7959 | UUAUGUCGACACCUUUUCA | 443 | 7977 | UGAAAAGGUGUCGACAUAA | 2094 |
| 7977 | AGCAACUUUUAGUGUUCCU | 444 | 7977 | AGCAACUUUUAGUGUUCCU | 444 | 7995 | AGGAACACUAAAAGUUGCU | 2095 |
| 7995 | UAUGGAAAAACUUAAGGCA | 445 | 7995 | UAUGGAAAAACUUAAGGCA | 445 | 8013 | UGCCUUAAGUUUUUCCAUA | 2096 |
| 8013 | ACUUGUUGCUACAGCUCAC | 446 | 8013 | ACUUGUUGCUACAGCUCAC | 446 | 8031 | GUGAGCUGUAGCAACAAGU | 2097 |
| 8031 | CAGCGAGUUAGCAAAGGGU | 447 | 8031 | CAGCGAGUUAGCAAAGGGU | 447 | 8049 | ACCCUUUGCUAACUCGCUG | 2098 |
| 8049 | UGUAGCUUUAGAUGGUGUC | 448 | 8049 | UGUAGCUUUAGAUGGUGUC | 448 | 8067 | GACACCAUCUAAAGCUACA | 2099 |
| 8067 | CCUUUCUACAUUCGUGUCA | 449 | 8067 | CCUUUCUACAUUCGUGUCA | 449 | 8085 | UGACACGAAUGUAGAAAGG | 2100 |
| 8085 | AGCUGCCCGACAAGGUGUU | 450 | 8085 | AGCUGCCCGACAAGGUGUU | 450 | 8103 | AACACCUUGUCGGGCAGCU | 2101 |
| 8103 | UGUUGAUACCGAUGUUGAC | 451 | 8103 | UGUUGAUACCGAUGUUGAC | 451 | 8121 | GUCAACAUCGGUAUCAACA | 2102 |
| 8121 | CACAAAGGAUGUUAUUGAA | 452 | 8121 | CACAAAGGAUGUUAUUGAA | 452 | 8139 | UUCAAUAACAUCCUUUGUG | 2103 |
| 8139 | AUGUCUCAAACUUUCACAU | 453 | 8139 | AUGUCUCAAACUUUCACAU | 453 | 8157 | AUGUGAAAGUUUGAGACAU | 2104 |
| 8157 | UCACUCUGACUUAGAAGUG | 454 | 8157 | UCACUCUGACUUAGAAGUG | 454 | 8175 | CACUUCUAAGUCAGAGUGA | 2105 |
| 8175 | GACAGGUGACAGUUGUAAC | 455 | 8175 | GACAGGUGACAGUUGUAAC | 455 | 8193 | GUUACAACUGUCACCUGUC | 2106 |
| 8193 | CAAUUUCAUGCUCACCUAU | 456 | 8193 | CAAUUUCAUGCUCACCUAU | 456 | 8211 | AUAGGUGAGCAUGAAAUUG | 2107 |
| 8211 | UAAUAAGGUUGAAAACAUG | 457 | 8211 | UAAUAAGGUUGAAAACAUG | 457 | 8229 | CAUGUUUUCAACCUUAUUA | 2108 |
| 8229 | GACGCCCAGAGAUCUUGGC | 458 | 8229 | GACGCCCAGAGAUCUUGGC | 458 | 8247 | GCCAAGAUCUCUGGGCGUC | 2109 |
| 8247 | CGCAUGUAUUGACUGUAAU | 459 | 8247 | CGCAUGUAUUGACUGUAAU | 459 | 8265 | AUUACAGUCAAUACAUGCG | 2110 |
| 8265 | UGCAAGGCAUAUCAAUGCC | 460 | 8265 | UGCAAGGCAUAUCAAUGCC | 460 | 8283 | GGCAUUGAUAUGCCUUGCA | 2111 |
| 8283 | CCAAGUAGCAAAAAGUCAC | 461 | 8283 | CCAAGUAGCAAAAAGUCAC | 461 | 8301 | GUGACUUUUUGCUACUUGG | 2112 |
| 8301 | CAAUGUUUCACUCAUCUGG | 462 | 8301 | CAAUGUUUCACUCAUCUGG | 462 | 8319 | CCAGAUGAGUGAAACAUUG | 2113 |
| 8319 | GAAUGUAAAAGACUACAUG | 463 | 8319 | GAAUGUAAAAGACUACAUG | 463 | 8337 | CAUGUAGUCUUUUACAUUC | 2114 |
| 8337 | GUCUUUAUCUGAACAGCUG | 464 | 8337 | GUCUUUAUCUGAACAGCUG | 464 | 8355 | CAGCUGUUCAGAUAAAGAC | 2115 |
| 8355 | GCGUAAACAAAUUCGUAGU | 465 | 8355 | GCGUAAACAAAUUCGUAGU | 465 | 8373 | ACUACGAAUUUGUUUACGC | 2116 |
| 8373 | UGCUGCCAAGAAGAACAAC | 466 | 8373 | UGCUGCCAAGAAGAACAAC | 466 | 8391 | GUUGUUCUUCUUGGCAGCA | 2117 |
| 8391 | CAUACCUUUUAGACUAACU | 467 | 8391 | CAUACCUUUUAGACUAACU | 467 | 8409 | AGUUAGUCUAAAAGGUAUG | 2118 |
| 8409 | UUGUGCUACAACUAGACAG | 468 | 8409 | UUGUGCUACAACUAGACAG | 468 | 8427 | CUGUCUAGUUGUAGCACAA | 2119 |
| 8427 | GGUUGUCAAUGUCAUAACU | 469 | 8427 | GGUUGUCAAUGUCAUAACU | 469 | 8445 | AGUUAUGACAUUGACAACC | 2120 |
| 8445 | UACUAAAAUCUCACUCAAG | 470 | 8445 | UACUAAAAUCUCACUCAAG | 470 | 8463 | CUUGAGUGAGAUUUUAGUA | 2121 |
| 8463 | GGGUGGUAAGAUUGUUAGU | 471 | 8463 | GGGUGGUAAGAUUGUUAGU | 471 | 8481 | ACUAACAAUCUUACCACCC | 2122 |
| 8481 | UACUUGUUUUAAACUUAUG | 472 | 8481 | UACUUGUUUUAAACUUAUG | 472 | 8499 | CAUAAGUUUAAAACAAGUA | 2123 |
| 8499 | GCUUAAGGCCACAUUAUUG | 473 | 8499 | GCUUAAGGCCACAUUAUUG | 473 | 8517 | CAAUAAUGUGGCCUUAAGC | 2124 |
| 8517 | GUGCGUUCUUGCUGCAUUG | 474 | 8517 | GUGCGUUCUUGCUGCAUUG | 474 | 8535 | CAAUGCAGCAAGAACGCAC | 2125 |
| 8535 | GGUUUGUUAUAUCGUUAUG | 475 | 8535 | GGUUUGUUAUAUCGUUAUG | 475 | 8553 | CAUAACGAUAUAACAAACC | 2126 |
| 8553 | GCCAGUACAUACAUUGUCA | 476 | 8553 | GCCAGUACAUACAUUGUCA | 476 | 8571 | UGACAAUGUAUGUACUGGC | 2127 |
| 8571 | AAUCCAUGAUGGUUACACA | 477 | 8571 | AAUCCAUGAUGGUUACACA | 477 | 8589 | UGUGUAACCAUCAUGGAUU | 2128 |
| 8589 | AAAUGAAAUCAUUGGUUAC | 478 | 8589 | AAAUGAAAUCAUUGGUUAC | 478 | 8607 | GUAACCAAUGAUUUCAUUU | 2129 |
| 8607 | CAAAGCCAUUCAGGAUGGU | 479 | 8607 | CAAAGCCAUUCAGGAUGGU | 479 | 8625 | ACCAUCCUGAAUGGCUUUG | 2130 |
| 8625 | UGUCACUCGUGACAUCAUU | 480 | 8625 | UGUCACUCGUGACAUCAUU | 480 | 8643 | AAUGAUGUCACGAGUGACA | 2131 |
| 8643 | UUCUACUGAUGAUUGUUUU | 481 | 8643 | UUCUACUGAUGAUUGUUUU | 481 | 8661 | AAAACAAUCAUCAGUAGAA | 2132 |
| 8661 | UGCAAAUAAACAUGCUGGU | 482 | 8661 | UGCAAAUAAACAUGCUGGU | 482 | 8679 | ACCAGCAUGUUUAUUUGCA | 2133 |
| 8679 | UUUUGACGCAUGGUUUAGC | 483 | 8679 | UUUUGACGCAUGGUUUAGC | 483 | 8697 | GCUAAACCAUGCGUCAAAA | 2134 |
| 8697 | CCAGCGUGGUGGUUCAUAC | 484 | 8697 | CCAGCGUGGUGGUUCAUAC | 484 | 8715 | GUAUGAACCACCACGCUGG | 2135 |
| 8715 | CAAAAAUGACAAAAGCUGC | 485 | 8715 | CAAAAAUGACAAAAGCUGC | 485 | 8733 | GCAGCUUUUGUCAUUUUUG | 2136 |
| 8733 | CCCUGUAGUAGCUGCUAUC | 486 | 8733 | CCCUGUAGUAGCUGCUAUC | 486 | 8751 | GAUAGCAGCUACUACAGGG | 2137 |
| 8751 | CAUUACAAGAGAGAUUGGU | 487 | 8751 | CAUUACAAGAGAGAUUGGU | 487 | 8769 | ACCAAUCUCUCUUGUAAUG | 2138 |
| 8769 | UUUCAUAGUGCCUGGCUUA | 488 | 8769 | UUUCAUAGUGCCUGGCUUA | 488 | 8787 | UAAGCCAGGCACUAUGAAA | 2139 |
| 8787 | ACCGGGUACUGUGCUGAGA | 489 | 8787 | ACCGGGUACUGUGCUGAGA | 489 | 8805 | UCUCAGCACAGUACCCGGU | 2140 |
| 8805 | AGCAAUCAAUGGUGACUUC | 490 | 8805 | AGCAAUCAAUGGUGACUUC | 490 | 8823 | GAAGUCACCAUUGAUUGCU | 2141 |
| 8823 | CUUGCAUUUUCUACCUCGU | 491 | 8823 | CUUGCAUUUUCUACCUCGU | 491 | 8841 | ACGAGGUAGAAAAUGCAAG | 2142 |
| 8841 | UGUUUUUAGUGCUGUUGGC | 492 | 8841 | UGUUUUUAGUGCUGUUGGC | 492 | 8859 | GCCAACAGCACUAAAAACA | 2143 |
| 8859 | CAACAUUUGCUACACACCU | 493 | 8859 | CAACAUUUGCUACACACCU | 493 | 8877 | AGGUGUGUAGCAAAUGUUG | 2144 |
| 8877 | UUCCAAACUCAUUGAGUAU | 494 | 8877 | UUCCAAACUCAUUGAGUAU | 494 | 8895 | AUACUCAAUGAGUUUGGAA | 2145 |
| 8895 | UAGUGAUUUUGCUACCUCU | 495 | 8895 | UAGUGAUUUUGCUACCUCU | 495 | 8913 | AGAGGUAGCAAAAUCACUA | 2146 |
| 8913 | UGCUUGCGUUCUUGCUGCU | 496 | 8913 | UGCUUGCGUUCUUGCUGCU | 496 | 8931 | AGCAGCAAGAACGCAAGCA | 2147 |
| 8931 | UGAGUGUACAAUUUUUAAG | 497 | 8931 | UGAGUGUACAAUUUUUAAG | 497 | 8949 | CUUAAAAAUUGUACACUCA | 2148 |
| 8949 | GGAUGCUAUGGGCAAACCU | 498 | 8949 | GGAUGCUAUGGGCAAACCU | 498 | 8967 | AGGUUUGCCCAUAGCAUCC | 2149 |
| 8967 | UGUGCCAUAUUGUUAUGAC | 499 | 8967 | UGUGCCAUAUUGUUAUGAC | 499 | 8985 | GUCAUAACAAUAUGGCACA | 2150 |
| 8985 | CACUAAUUUGCUAGAGGGU | 500 | 8985 | CACUAAUUUGCUAGAGGGU | 500 | 9003 | ACCCUCUAGCAAAUUAGUG | 2151 |
| 9003 | UUCUAUUUCUUAUAGUGAG | 501 | 9003 | UUCUAUUUCUUAUAGUGAG | 501 | 9021 | CUCACUAUAAGAAAUAGAA | 2152 |
| 9021 | GCUUCGUCCAGACACUCGU | 502 | 9021 | GCUUCGUCCAGACACUCGU | 502 | 9039 | ACGAGUGUCUGGACGAAGC | 2153 |
| 9039 | UUAUGUGCUUAUGGAUGGU | 503 | 9039 | UUAUGUGCUUAUGGAUGGU | 503 | 9057 | ACCAUCCAUAAGCACAUAA | 2154 |
| 9057 | UUCCAUCAUACAGUUUCCU | 504 | 9057 | UUCCAUCAUACAGUUUCCU | 504 | 9075 | AGGAAACUGUAUGAUGGAA | 2155 |
| 9075 | UAACACUUACCUGGAGGGU | 505 | 9075 | UAACACUUACCUGGAGGGU | 505 | 9093 | ACCCUCCAGGUAAGUGUUA | 2156 |
| 9093 | UUCUGUUAGAGUAGUAACA | 506 | 9093 | UUCUGUUAGAGUAGUAACA | 506 | 9111 | UGUUACUACUCUAACAGAA | 2157 |
| 9111 | AACUUUUGAUGCUGAGUAC | 507 | 9111 | AACUUUUGAUGCUGAGUAC | 507 | 9129 | GUACUCAGCAUCAAAAGUU | 2158 |
| 9129 | CUGUAGACAUGGUACAUGC | 508 | 9129 | CUGUAGACAUGGUACAUGC | 508 | 9147 | GCAUGUACCAUGUCUACAG | 2159 |
| 9147 | CGAAAGGUCAGAAGUAGGU | 509 | 9147 | CGAAAGGUCAGAAGUAGGU | 509 | 9165 | ACCUACUUCUGACCUUUCG | 2160 |
| 9165 | UAUUUGCCUAUCUACCAGU | 510 | 9165 | UAUUUGCCUAUCUACCAGU | 510 | 9183 | ACUGGUAGAUAGGCAAAUA | 2161 |
| 9183 | UGGUAGAUGGGUUCUUAAU | 511 | 9183 | UGGUAGAUGGGUUCUUAAU | 511 | 9201 | AUUAAGAACCCAUCUACCA | 2162 |
| 9201 | UAAUGAGCAUUACAGAGCU | 512 | 9201 | UAAUGAGCAUUACAGAGCU | 512 | 9219 | AGCUCUGUAAUGCUCAUUA | 2163 |
| 9219 | UCUAUCAGGAGUUUUCUGU | 513 | 9219 | UCUAUCAGGAGUUUUCUGU | 513 | 9237 | ACAGAAAACUCCUGAUAGA | 2164 |
| 9237 | UGGUGUUGAUGCGAUGAAU | 514 | 9237 | UGGUGUUGAUGCGAUGAAU | 514 | 9255 | AUUCAUCGCAUCAACACCA | 2165 |
| 9255 | UCUCAUAGCUAACAUCUUU | 515 | 9255 | UCUCAUAGCUAACAUCUUU | 515 | 9273 | AAAGAUGUUAGCUAUGAGA | 2166 |
| 9273 | UACUCCUCUUGUGCAACCU | 516 | 9273 | UACUCCUCUUGUGCAACCU | 516 | 9291 | AGGUUGCACAAGAGGAGUA | 2167 |
| 9291 | UGUGGGUGCUUUAGAUGUG | 517 | 9291 | UGUGGGUGCUUUAGAUGUG | 517 | 9309 | CACAUCUAAAGCACCCACA | 2168 |
| 9309 | GUCUGCUUCAGUAGUGGCU | 518 | 9309 | GUCUGCUUCAGUAGUGGCU | 518 | 9327 | AGCCACUACUGAAGCAGAC | 2169 |
| 9327 | UGGUGGUAUUAUUGCCAUA | 519 | 9327 | UGGUGGUAUUAUUGCCAUA | 519 | 9345 | UAUGGCAAUAAUACCACCA | 2170 |
| 9345 | AUUGGUGACUUGUGCUGCC | 520 | 9345 | AUUGGUGACUUGUGCUGCC | 520 | 9363 | GGCAGCACAAGUCACCAAU | 2171 |
| 9363 | CUACUACUUUAUGAAAUUC | 521 | 9363 | CUACUACUUUAUGAAAUUC | 521 | 9381 | GAAUUUCAUAAAGUAGUAG | 2172 |
| 9381 | CAGACGUGUUUUUGGUGAG | 522 | 9381 | CAGACGUGUUUUUGGUGAG | 522 | 9399 | CUCACCAAAAACACGUCUG | 2173 |
| 9399 | GUACAACCAUGUUGUUGCU | 523 | 9399 | GUACAACCAUGUUGUUGCU | 523 | 9417 | AGCAACAACAUGGUUGUAC | 2174 |
| 9417 | UGCUAAUGCACUUUUGUUU | 524 | 9417 | UGCUAAUGCACUUUUGUUU | 524 | 9435 | AAACAAAAGUGCAUUAGCA | 2175 |
| 9435 | UUUGAUGUCUUUCACUAUA | 525 | 9435 | UUUGAUGUCUUUCACUAUA | 525 | 9453 | UAUAGUGAAAGACAUCAAA | 2176 |
| 9453 | ACUCUGUCUGGUACCAGCU | 526 | 9453 | ACUCUGUCUGGUACCAGCU | 526 | 9471 | AGCUGGUACCAGACAGAGU | 2177 |
| 9471 | UUACAGCUUUCUGCCGGGA | 527 | 9471 | UUACAGCUUUCUGCCGGGA | 527 | 9489 | UCCCGGCAGAAAGCUGUAA | 2178 |
| 9489 | AGUCUACUCAGUCUUUUAC | 528 | 9489 | AGUCUACUCAGUCUUUUAC | 528 | 9507 | GUAAAAGACUGAGUAGACU | 2179 |
| 9507 | CUUGUACUUGACAUUCUAU | 529 | 9507 | CUUGUACUUGACAUUCUAU | 529 | 9525 | AUAGAAUGUCAAGUACAAG | 2180 |
| 9525 | UUUCACCAAUGAUGUUUCA | 530 | 9525 | UUUCACCAAUGAUGUUUCA | 530 | 9543 | UGAAACAUCAUUGGUGAAA | 2181 |
| 9543 | AUUCUUGGCUCACCUUCAA | 531 | 9543 | AUUCUUGGCUCACCUUCAA | 531 | 9561 | UUGAAGGUGAGCCAAGAAU | 2182 |
| 9561 | AUGGUUUGCCAUGUUUUCU | 532 | 9561 | AUGGUUUGCCAUGUUUUCU | 532 | 9579 | AGAAAACAUGGCAAACCAU | 2183 |
| 9579 | UCCUAUUGUGCCUUUUUGG | 533 | 9579 | UCCUAUUGUGCCUUUUUGG | 533 | 9597 | CCAAAAAGGCACAAUAGGA | 2184 |
| 9597 | GAUAACAGCAAUCUAUGUA | 534 | 9597 | GAUAACAGCAAUCUAUGUA | 534 | 9615 | UACAUAGAUUGCUGUUAUC | 2185 |
| 9615 | AUUCUGUAUUUCUCUGAAG | 535 | 9615 | AUUCUGUAUUUCUCUGAAG | 535 | 9633 | CUUCAGAGAAAUACAGAAU | 2186 |
| 9633 | GCACUGCCAUUGGUUCUUU | 536 | 9633 | GCACUGCCAUUGGUUCUUU | 536 | 9651 | AAAGAACCAAUGGCAGUGC | 2187 |
| 9651 | UAACAACUAUCUUAGGAAA | 537 | 9651 | UAACAACUAUCUUAGGAAA | 537 | 9669 | UUUCCUAAGAUAGUUGUUA | 2188 |
| 9669 | AAGAGUCAUGUUUAAUGGA | 538 | 9669 | AAGAGUCAUGUUUAAUGGA | 538 | 9687 | UCCAUUAAACAUGACUCUU | 2189 |
| 9687 | AGUUACAUUUAGUACCUUC | 539 | 9687 | AGUUACAUUUAGUACCUUC | 539 | 9705 | GAAGGUACUAAAUGUAACU | 2190 |
| 9705 | CGAGGAGGCUGCUUUGUGU | 540 | 9705 | CGAGGAGGCUGCUUUGUGU | 540 | 9723 | ACACAAAGCAGCCUCCUCG | 2191 |
| 9723 | UACCUUUUUGCUCAACAAG | 541 | 9723 | UACCUUUUUGCUCAACAAG | 541 | 9741 | CUUGUUGAGCAAAAAGGUA | 2192 |
| 9741 | GGAAAUGUACCUAAAAUUG | 542 | 9741 | GGAAAUGUACCUAAAAUUG | 542 | 9759 | CAAUUUUAGGUACAUUUCC | 2193 |
| 9759 | GCGUAGCGAGACACUGUUG | 543 | 9759 | GCGUAGCGAGACACUGUUG | 543 | 9777 | CAACAGUGUCUCGCUACGC | 2194 |
| 9777 | GCCACUUACACAGUAUAAC | 544 | 9777 | GCCACUUACACAGUAUAAC | 544 | 9795 | GUUAUACUGUGUAAGUGGC | 2195 |
| 9795 | CAGGUAUCUUGCUCUAUAU | 545 | 9795 | CAGGUAUCUUGCUCUAUAU | 545 | 9813 | AUAUAGAGCAAGAUACCUG | 2196 |
| 9813 | UAACAAGUACAAGUAUUUC | 546 | 9813 | UAACAAGUACAAGUAUUUC | 546 | 9831 | GAAAUACUUGUACUUGUUA | 2197 |
| 9831 | CAGUGGAGCCUUAGAUACU | 547 | 9831 | CAGUGGAGCCUUAGAUACU | 547 | 9849 | AGUAUCUAAGGCUCCACUG | 2198 |
| 9849 | UACCAGCUAUCGUGAAGCA | 548 | 9849 | UACCAGCUAUCGUGAAGCA | 548 | 9867 | UGCUUCACGAUAGCUGGUA | 2199 |
| 9867 | AGCUUGCUGCCACUUAGCA | 549 | 9867 | AGCUUGCUGCCACUUAGCA | 549 | 9885 | UGCUAAGUGGCAGCAAGCU | 2200 |
| 9885 | AAAGGCUCUAAAUGACUUU | 550 | 9885 | AAAGGCUCUAAAUGACUUU | 550 | 9903 | AAAGUCAUUUAGAGCCUUU | 2201 |
| 9903 | UAGCAACUCAGGUGCUGAU | 551 | 9903 | UAGCAACUCAGGUGCUGAU | 551 | 9921 | AUCAGCACCUGAGUUGCUA | 2202 |
| 9921 | UGUUCUCUACCAACCACCA | 552 | 9921 | UGUUCUCUACCAACCACCA | 552 | 9939 | UGGUGGUUGGUAGAGAACA | 2203 |
| 9939 | ACAGACAUCAAUCACUUCU | 553 | 9939 | ACAGACAUCAAUCACUUCU | 553 | 9957 | AGAAGUGAUUGAUGUCUGU | 2204 |
| 9957 | UGCUGUUCUGCAGAGUGGU | 554 | 9957 | UGCUGUUCUGCAGAGUGGU | 554 | 9975 | ACCACUCUGCAGAACAGCA | 2205 |
| 9975 | UUUUAGGAAAAUGGCAUUC | 555 | 9975 | UUUUAGGAAAAUGGCAUUC | 555 | 9993 | GAAUGCCAUUUUCCUAAAA | 2206 |
| 9993 | CCCGUCAGGCAAAGUUGAA | 556 | 9993 | CCCGUCAGGCAAAGUUGAA | 556 | 10011 | UUCAACUUUGCCUGACGGG | 2207 |
| 10011 | AGGGUGCAUGGUACAAGUA | 557 | 10011 | AGGGUGCAUGGUACAAGUA | 557 | 10029 | UACUUGUACCAUGCACCCU | 2208 |
| 10029 | AACCUGUGGAACUACAACU | 558 | 10029 | AACCUGUGGAACUACAACU | 558 | 10047 | AGUUGUAGUUCCACAGGUU | 2209 |
| 10047 | UCUUAAUGGAUUGUGGUUG | 559 | 10047 | UCUUAAUGGAUUGUGGUUG | 559 | 10065 | CAACCACAAUCCAUUAAGA | 2210 |
| 10065 | GGAUGACACAGUAUACUGU | 560 | 10065 | GGAUGACACAGUAUACUGU | 560 | 10083 | ACAGUAUACUGUGUCAUCC | 2211 |
| 10083 | UCCAAGACAUGUCAUUUGC | 561 | 10083 | UCCAAGACAUGUCAUUUGC | 561 | 10101 | GCAAAUGACAUGUCUUGGA | 2212 |
| 10101 | CACAGCAGAAGACAUGCUU | 562 | 10101 | CACAGCAGAAGACAUGCUU | 562 | 10119 | AAGCAUGUCUUCUGCUGUG | 2213 |
| 10119 | UAAUCCUAACUAUGAAGAU | 563 | 10119 | UAAUCCUAACUAUGAAGAU | 563 | 10137 | AUCUUCAUAGUUAGGAUUA | 2214 |
| 10137 | UCUGCUCAUUCGCAAAUCC | 564 | 10137 | UCUGCUCAUUCGCAAAUCC | 564 | 10155 | GGAUUUGCGAAUGAGCAGA | 2215 |
| 10155 | CAACCAUAGCUUUCUUGUU | 565 | 10155 | CAACCAUAGCUUUCUUGUU | 565 | 10173 | AACAAGAAAGCUAUGGUUG | 2216 |
| 10173 | UCAGGCUGGCAAUGUUCAA | 566 | 10173 | UCAGGCUGGCAAUGUUCAA | 566 | 10191 | UUGAACAUUGCCAGCCUGA | 2217 |
| 10191 | ACUUCGUGUUAUUGGCCAU | 567 | 10191 | ACUUCGUGUUAUUGGCCAU | 567 | 10209 | AUGGCCAAUAACACGAAGU | 2218 |
| 10209 | UUCUAUGCAAAAUUGUCUG | 568 | 10209 | UUCUAUGCAAAAUUGUCUG | 568 | 10227 | CAGACAAUUUUGCAUAGAA | 2219 |
| 10227 | GCUUAGGCUUAAAGUUGAU | 569 | 10227 | GCUUAGGCUUAAAGUUGAU | 569 | 10245 | AUCAACUUUAAGCCUAAGC | 2220 |
| 10245 | UACUUCUAACCCUAAGACA | 570 | 10245 | UACUUCUAACCCUAAGACA | 570 | 10263 | UGUCUUAGGGUUAGAAGUA | 2221 |
| 10263 | ACCCAAGUAUAAAUUUGUC | 571 | 10263 | ACCCAAGUAUAAAUUUGUC | 571 | 10281 | GACAAAUUUAUACUUGGGU | 2222 |
| 10281 | CCGUAUCCAACCUGGUCAA | 572 | 10281 | CCGUAUCCAACCUGGUCAA | 572 | 10299 | UUGACCAGGUUGGAUACGG | 2223 |
| 10299 | AACAUUUUCAGUUCUAGCA | 573 | 10299 | AACAUUUUCAGUUCUAGCA | 573 | 10317 | UGCUAGAACUGAAAAUGUU | 2224 |
| 10317 | AUGCUACAAUGGUUCACCA | 574 | 10317 | AUGCUACAAUGGUUCACCA | 574 | 10335 | UGGUGAACCAUUGUAGCAU | 2225 |
| 10335 | AUCUGGUGUUUAUCAGUGU | 575 | 10335 | AUCUGGUGUUUAUCAGUGU | 575 | 10353 | ACACUGAUAAACACCAGAU | 2226 |
| 10353 | UGCCAUGAGACCUAAUCAU | 576 | 10353 | UGCCAUGAGACCUAAUCAU | 576 | 10371 | AUGAUUAGGUCUCAUGGCA | 2227 |
| 10371 | UACCAUUAAAGGUUCUUUC | 577 | 10371 | UACCAUUAAAGGUUCUUUC | 577 | 10389 | GAAAGAACCUUUAAUGGUA | 2228 |
| 10389 | CCUUAAUGGAUCAUGUGGU | 578 | 10389 | CCUUAAUGGAUCAUGUGGU | 578 | 10407 | ACCACAUGAUCCAUUAAGG | 2229 |
| 10407 | UAGUGUUGGUUUUAACAUU | 579 | 10407 | UAGUGUUGGUUUUAACAUU | 579 | 10425 | AAUGUUAAAACCAACACUA | 2230 |
| 10425 | UGAUUAUGAUUGCGUGUCU | 580 | 10425 | UGAUUAUGAUUGCGUGUCU | 580 | 10443 | AGACACGCAAUCAUAAUCA | 2231 |
| 10443 | UUUCUGCUAUAUGCAUCAU | 581 | 10443 | UUUCUGCUAUAUGCAUCAU | 581 | 10461 | AUGAUGCAUAUAGCAGAAA | 2232 |
| 10461 | UAUGGAGCUUCCAACAGGA | 582 | 10461 | UAUGGAGCUUCCAACAGGA | 582 | 10479 | UCCUGUUGGAAGCUCCAUA | 2233 |
| 10479 | AGUACACGCUGGUACUGAC | 583 | 10479 | AGUACACGCUGGUACUGAC | 583 | 10497 | GUCAGUACCAGCGUGUACU | 2234 |
| 10497 | CUUAGAAGGUAAAUUCUAU | 584 | 10497 | CUUAGAAGGUAAAUUCUAU | 584 | 10515 | AUAGAAUUUACCUUCUAAG | 2235 |
| 10515 | UGGUCCAUUUGUUGACAGA | 585 | 10515 | UGGUCCAUUUGUUGACAGA | 585 | 10533 | UCUGUCAACAAAUGGACCA | 2236 |
| 10533 | ACAAACUGCACAGGCUGCA | 586 | 10533 | ACAAACUGCACAGGCUGCA | 586 | 10551 | UGCAGCCUGUGCAGUUUGU | 2237 |
| 10551 | AGGUACAGACACAACCAUA | 587 | 10551 | AGGUACAGACACAACCAUA | 587 | 10569 | UAUGGUUGUGUCUGUACCU | 2238 |
| 10569 | AACAUUAAAUGUUUUGGCA | 588 | 10569 | AACAUUAAAUGUUUUGGCA | 588 | 10587 | UGCCAAAACAUUUAAUGUU | 2239 |
| 10587 | AUGGCUGUAUGCUGCUGUU | 589 | 10587 | AUGGCUGUAUGCUGCUGUU | 589 | 10605 | AACAGCAGCAUACAGCCAU | 2240 |
| 10605 | UAUCAAUGGUGAUAGGUGG | 590 | 10605 | UAUCAAUGGUGAUAGGUGG | 590 | 10623 | CCACCUAUCACCAUUGAUA | 2241 |
| 10623 | GUUUCUUAAUAGAUUCACC | 591 | 10623 | GUUUCUUAAUAGAUUCACC | 591 | 10641 | GGUGAAUCUAUUAAGAAAC | 2242 |
| 10641 | CACUACUUUGAAUGACUUU | 592 | 10641 | CACUACUUUGAAUGACUUU | 592 | 10659 | AAAGUCAUUCAAAGUAGUG | 2243 |
| 10659 | UAACCUUGUGGCAAUGAAG | 593 | 10659 | UAACCUUGUGGCAAUGAAG | 593 | 10677 | CUUCAUUGCCACAAGGUUA | 2244 |
| 10677 | GUACAACUAUGAACCUUUG | 594 | 10677 | GUACAACUAUGAACCUUUG | 594 | 10695 | CAAAGGUUCAUAGUUGUAC | 2245 |
| 10695 | GACACAAGAUCAUGUUGAC | 595 | 10695 | GACACAAGAUCAUGUUGAC | 595 | 10713 | GUCAACAUGAUCUUGUGUC | 2246 |
| 10713 | CAUAUUGGGACCUCUUUCU | 596 | 10713 | CAUAUUGGGACCUCUUUCU | 596 | 10731 | AGAAAGAGGUCCCAAUAUG | 2247 |
| 10731 | UGCUCAAACAGGAAUUGCC | 597 | 10731 | UGCUCAAACAGGAAUUGCC | 597 | 10749 | GGCAAUUCCUGUUUGAGCA | 2248 |
| 10749 | CGUCUUAGAUAUGUGUGCU | 598 | 10749 | CGUCUUAGAUAUGUGUGCU | 598 | 10767 | AGCACACAUAUCUAAGACG | 2249 |
| 10767 | UGCUUUGAAAGAGCUGCUG | 599 | 10767 | UGCUUUGAAAGAGCUGCUG | 599 | 10785 | CAGCAGCUCUUUCAAAGCA | 2250 |
| 10785 | GCAGAAUGGUAUGAAUGGU | 600 | 10785 | GCAGAAUGGUAUGAAUGGU | 600 | 10803 | ACCAUUCAUACCAUUCUGC | 2251 |
| 10803 | UCGUACUAUCCUUGGUAGC | 601 | 10803 | UCGUACUAUCCUUGGUAGC | 601 | 10821 | GCUACCAAGGAUAGUACGA | 2252 |
| 10821 | CACUAUUUUAGAAGAUGAG | 602 | 10821 | CACUAUUUUAGAAGAUGAG | 602 | 10839 | CUCAUCUUCUAAAAUAGUG | 2253 |
| 10839 | GUUUACACCAUUUGAUGUU | 603 | 10839 | GUUUACACCAUUUGAUGUU | 603 | 10857 | AACAUCAAAUGGUGUAAAC | 2254 |
| 10857 | UGUUAGACAAUGCUCUGGU | 604 | 10857 | UGUUAGACAAUGCUCUGGU | 604 | 10875 | ACCAGAGCAUUGUCUAACA | 2255 |
| 10875 | UGUUACCUUCCAAGGUAAG | 605 | 10875 | UGUUACCUUCCAAGGUAAG | 605 | 10893 | CUUACCUUGGAAGGUAACA | 2256 |
| 10893 | GUUCAAGAAAAUUGUUAAG | 606 | 10893 | GUUCAAGAAAAUUGUUAAG | 606 | 10911 | CUUAACAAUUUUCUUGAAC | 2257 |
| 10911 | GGGCACUCAUCAUUGGAUG | 607 | 10911 | GGGCACUCAUCAUUGGAUG | 607 | 10929 | CAUCCAAUGAUGAGUGCCC | 2258 |
| 10929 | GCUUUUAACUUUCUUGACA | 608 | 10929 | GCUUUUAACUUUCUUGACA | 608 | 10947 | UGUCAAGAAAGUUAAAAGC | 2259 |
| 10947 | AUCACUAUUGAUUCUUGUU | 609 | 10947 | AUCACUAUUGAUUCUUGUU | 609 | 10965 | AACAAGAAUCAAUAGUGAU | 2260 |
| 10965 | UCAAAGUACACAGUGGUCA | 610 | 10965 | UCAAAGUACACAGUGGUCA | 610 | 10983 | UGACCACUGUGUACUUUGA | 2261 |
| 10983 | ACUGUUUUUCUUUGUUUAC | 611 | 10983 | ACUGUUUUUCUUUGUUUAC | 611 | 11001 | GUAAACAAAGAAAAACAGU | 2262 |
| 11001 | CGAGAAUGCUUUCUUGCCA | 612 | 11001 | CGAGAAUGCUUUCUUGCCA | 612 | 11019 | UGGCAAGAAAGCAUUCUCG | 2263 |
| 11019 | AUUUACUCUUGGUAUUAUG | 613 | 11019 | AUUUACUCUUGGUAUUAUG | 613 | 11037 | CAUAAUACCAAGAGUAAAU | 2264 |
| 11037 | GGCAAUUGCUGCAUGUGCU | 614 | 11037 | GGCAAUUGCUGCAUGUGCU | 614 | 11055 | AGCACAUGCAGCAAUUGCC | 2265 |
| 11055 | UAUGCUGCUUGUUAAGCAU | 615 | 11055 | UAUGCUGCUUGUUAAGCAU | 615 | 11073 | AUGCUUAACAAGCAGCAUA | 2266 |
| 11073 | UAAGCACGCAUUCUUGUGC | 616 | 11073 | UAAGCACGCAUUCUUGUGC | 616 | 11091 | GCACAAGAAUGCGUGCUUA | 2267 |
| 11091 | CUUGUUUCUGUUACCUUCU | 617 | 11091 | CUUGUUUCUGUUACCUUCU | 617 | 11109 | AGAAGGUAACAGAAACAAG | 2268 |
| 11109 | UCUUGCAACAGUUGCUUAC | 618 | 11109 | UCUUGCAACAGUUGCUUAC | 618 | 11127 | GUAAGCAACUGUUGCAAGA | 2269 |
| 11127 | CUUUAAUAUGGUCUACAUG | 619 | 11127 | CUUUAAUAUGGUCUACAUG | 619 | 11145 | CAUGUAGACCAUAUUAAAG | 2270 |
| 11145 | GCCUGCUAGCUGGGUGAUG | 620 | 11145 | GCCUGCUAGCUGGGUGAUG | 620 | 11163 | CAUCACCCAGCUAGCAGGC | 2271 |
| 11163 | GCGUAUCAUGACAUGGCUU | 621 | 11163 | GCGUAUCAUGACAUGGCUU | 621 | 11181 | AAGCCAUGUCAUGAUACGC | 2272 |
| 11181 | UGAAUUGGCUGACACUAGC | 622 | 11181 | UGAAUUGGCUGACACUAGC | 622 | 11199 | GCUAGUGUCAGCCAAUUCA | 2273 |
| 11199 | CUUGUCUGGUUAUAGGCUU | 623 | 11199 | CUUGUCUGGUUAUAGGCUU | 623 | 11217 | AAGCCUAUAACCAGACAAG | 2274 |
| 11217 | UAAGGAUUGUGUUAUGUAU | 624 | 11217 | UAAGGAUUGUGUUAUGUAU | 624 | 11235 | AUACAUAACACAAUCCUUA | 2275 |
| 11235 | UGCUUCAGCUUUAGUUUUG | 625 | 11235 | UGCUUCAGCUUUAGUUUUG | 625 | 11253 | CAAAACUAAAGCUGAAGCA | 2276 |
| 11253 | GCUUAUUCUCAUGACAGCU | 626 | 11253 | GCUUAUUCUCAUGACAGCU | 626 | 11271 | AGCUGUCAUGAGAAUAAGC | 2277 |
| 11271 | UCGCACUGUUUAUGAUGAU | 627 | 11271 | UCGCACUGUUUAUGAUGAU | 627 | 11289 | AUCAUCAUAAACAGUGCGA | 2278 |
| 11289 | UGCUGCUAGACGUGUUUGG | 628 | 11289 | UGCUGCUAGACGUGUUUGG | 628 | 11307 | CCAAACACGUCUAGCAGCA | 2279 |
| 11307 | GACACUGAUGAAUGUCAUU | 629 | 11307 | GACACUGAUGAAUGUCAUU | 629 | 11325 | AAUGACAUUCAUCAGUGUC | 2280 |
| 11325 | UACACUUGUUUACAAAGUC | 630 | 11325 | UACACUUGUUUACAAAGUC | 630 | 11343 | GACUUUGUAAACAAGUGUA | 2281 |
| 11343 | CUACUAUGGUAAUGCUUUA | 631 | 11343 | CUACUAUGGUAAUGCUUUA | 631 | 11361 | UAAAGCAUUACCAUAGUAG | 2282 |
| 11361 | AGAUCAAGCUAUUUCCAUG | 632 | 11361 | AGAUCAAGCUAUUUCCAUG | 632 | 11379 | CAUGGAAAUAGCUUGAUCU | 2283 |
| 11379 | GUGGGCCUUAGUUAUUUCU | 633 | 11379 | GUGGGCCUUAGUUAUUUCU | 633 | 11397 | AGAAAUAACUAAGGCCCAC | 2284 |
| 11397 | UGUAACCUCUAACUAUUCU | 634 | 11397 | UGUAACCUCUAACUAUUCU | 634 | 11415 | AGAAUAGUUAGAGGUUACA | 2285 |
| 11415 | UGGUGUCGUUACGACUAUC | 635 | 11415 | UGGUGUCGUUACGACUAUC | 635 | 11433 | GAUAGUCGUAACGACACCA | 2286 |
| 11433 | CAUGUUUUUAGCUAGAGCU | 636 | 11433 | CAUGUUUUUAGCUAGAGCU | 636 | 11451 | AGCUCUAGCUAAAAACAUG | 2287 |
| 11451 | UAUAGUGUUUGUGUGUGUU | 637 | 11451 | UAUAGUGUUUGUGUGUGUU | 637 | 11469 | AACACACACAAACACUAUA | 2288 |
| 11469 | UGAGUAUUACCCAUUGUUA | 638 | 11469 | UGAGUAUUACCCAUUGUUA | 638 | 11487 | UAACAAUGGGUAAUACUCA | 2289 |
| 11487 | AUUUAUUACUGGCAACACC | 639 | 11487 | AUUUAUUACUGGCAACACC | 639 | 11505 | GGUGUUGCCAGUAAUAAAU | 2290 |
| 11505 | CUUACAGUGUAUCAUGCUU | 640 | 11505 | CUUACAGUGUAUCAUGCUU | 640 | 11523 | AAGCAUGAUACACUGUAAG | 2291 |
| 11523 | UGUUUAUUGUUUCUUAGGC | 641 | 11523 | UGUUUAUUGUUUCUUAGGC | 641 | 11541 | GCCUAAGAAACAAUAAACA | 2292 |
| 11541 | CUAUUGUUGCUGCUGCUAC | 642 | 11541 | CUAUUGUUGCUGCUGCUAC | 642 | 11559 | GUAGCAGCAGCAACAAUAG | 2293 |
| 11559 | CUUUGGCCUUUUCUGUUUA | 643 | 11559 | CUUUGGCCUUUUCUGUUUA | 643 | 11577 | UAAACAGAAAAGGCCAAAG | 2294 |
| 11577 | ACUCAACCGUUACUUCAGG | 644 | 11577 | ACUCAACCGUUACUUCAGG | 644 | 11595 | CCUGAAGUAACGGUUGAGU | 2295 |
| 11595 | GCUUACUCUUGGUGUUUAU | 645 | 11595 | GCUUACUCUUGGUGUUUAU | 645 | 11613 | AUAAACACCAAGAGUAAGC | 2296 |
| 11613 | UGACUACUUGGUCUCUACA | 646 | 11613 | UGACUACUUGGUCUCUACA | 646 | 11631 | UGUAGAGACCAAGUAGUCA | 2297 |
| 11631 | ACAAGAAUUUAGGUAUAUG | 647 | 11631 | ACAAGAAUUUAGGUAUAUG | 647 | 11649 | CAUAUACCUAAAUUCUUGU | 2298 |
| 11649 | GAACUCCCAGGGGCUUUUG | 648 | 11649 | GAACUCCCAGGGGCUUUUG | 648 | 11667 | CAAAAGCCCCUGGGAGUUC | 2299 |
| 11667 | GCCUCCUAAGAGUAGUAUU | 649 | 11667 | GCCUCCUAAGAGUAGUAUU | 649 | 11685 | AAUACUACUCUUAGGAGGC | 2300 |
| 11685 | UGAUGCUUUCAAGCUUAAC | 650 | 11685 | UGAUGCUUUCAAGCUUAAC | 650 | 11703 | GUUAAGCUUGAAAGCAUCA | 2301 |
| 11703 | CAUUAAGUUGUUGGGUAUU | 651 | 11703 | CAUUAAGUUGUUGGGUAUU | 651 | 11721 | AAUACCCAACAACUUAAUG | 2302 |
| 11721 | UGGAGGUAAACCAUGUAUC | 652 | 11721 | UGGAGGUAAACCAUGUAUC | 652 | 11739 | GAUACAUGGUUUACCUCCA | 2303 |
| 11739 | CAAGGUUGCUACUGUACAG | 653 | 11739 | CAAGGUUGCUACUGUACAG | 653 | 11757 | CUGUACAGUAGCAACCUUG | 2304 |
| 11757 | GUCUAAAAUGUCUGACGUA | 654 | 11757 | GUCUAAAAUGUCUGACGUA | 654 | 11775 | UACGUCAGACAUUUUAGAC | 2305 |
| 11775 | AAAGUGCACAUCUGUGGUA | 655 | 11775 | AAAGUGCACAUCUGUGGUA | 655 | 11793 | UACCACAGAUGUGCACUUU | 2306 |
| 11793 | ACUGCUCUCGGUUCUUCAA | 656 | 11793 | ACUGCUCUCGGUUCUUCAA | 656 | 11811 | UUGAAGAACCGAGAGCAGU | 2307 |
| 11811 | ACAACUUAGAGUAGAGUCA | 657 | 11811 | ACAACUUAGAGUAGAGUCA | 657 | 11829 | UGACUCUACUCUAAGUUGU | 2308 |
| 11829 | AUCUUCUAAAUUGUGGGCA | 658 | 11829 | AUCUUCUAAAUUGUGGGCA | 658 | 11847 | UGCCCACAAUUUAGAAGAU | 2309 |
| 11847 | ACAAUGUGUACAACUCCAC | 659 | 11847 | ACAAUGUGUACAACUCCAC | 659 | 11865 | GUGGAGUUGUACACAUUGU | 2310 |
| 11865 | CAAUGAUAUUCUUCUUGCA | 660 | 11865 | CAAUGAUAUUCUUCUUGCA | 660 | 11883 | UGCAAGAAGAAUAUCAUUG | 2311 |
| 11883 | AAAAGACACAACUGAAGCU | 661 | 11883 | AAAAGACACAACUGAAGCU | 661 | 11901 | AGCUUCAGUUGUGUCUUUU | 2312 |
| 11901 | UUUCGAGAAGAUGGUUUCU | 662 | 11901 | UUUCGAGAAGAUGGUUUCU | 662 | 11919 | AGAAACCAUCUUCUCGAAA | 2313 |
| 11919 | UCUUUUGUCUGUUUUGCUA | 663 | 11919 | UCUUUUGUCUGUUUUGCUA | 663 | 11937 | UAGCAAAACAGACAAAAGA | 2314 |
| 11937 | AUCCAUGCAGGGUGCUGUA | 664 | 11937 | AUCCAUGCAGGGUGCUGUA | 664 | 11955 | UACAGCACCCUGCAUGGAU | 2315 |
| 11955 | AGACAUUAAUAGGUUGUGC | 665 | 11955 | AGACAUUAAUAGGUUGUGC | 665 | 11973 | GCACAACCUAUUAAUGUCU | 2316 |
| 11973 | CGAGGAAAUGCUCGAUAAC | 666 | 11973 | CGAGGAAAUGCUCGAUAAC | 666 | 11991 | GUUAUCGAGCAUUUCCUCG | 2317 |
| 11991 | CCGUGCUACUCUUCAGGCU | 667 | 11991 | CCGUGCUACUCUUCAGGCU | 667 | 12009 | AGCCUGAAGAGUAGCACGG | 2318 |
| 12009 | UAUUGCUUCAGAAUUUAGU | 668 | 12009 | UAUUGCUUCAGAAUUUAGU | 668 | 12027 | ACUAAAUUCUGAAGCAAUA | 2319 |
| 12027 | UUCUUUACCAUCAUAUGCC | 669 | 12027 | UUCUUUACCAUCAUAUGCC | 669 | 12045 | GGCAUAUGAUGGUAAAGAA | 2320 |
| 12045 | CGCUUAUGCCACUGCCCAG | 670 | 12045 | CGCUUAUGCCACUGCCCAG | 670 | 12063 | CUGGGCAGUGGCAUAAGCG | 2321 |
| 12063 | GGAGGCCUAUGAGCAGGCU | 671 | 12063 | GGAGGCCUAUGAGCAGGCU | 671 | 12081 | AGCCUGCUCAUAGGCCUCC | 2322 |
| 12081 | UGUAGCUAAUGGUGAUUCU | 672 | 12081 | UGUAGCUAAUGGUGAUUCU | 672 | 12099 | AGAAUCACCAUUAGCUACA | 2323 |
| 12099 | UGAAGUCGUUCUCAAAAAG | 673 | 12099 | UGAAGUCGUUCUCAAAAAG | 673 | 12117 | CUUUUUGAGAACGACUUCA | 2324 |
| 12117 | GUUAAAGAAAUCUUUGAAU | 674 | 12117 | GUUAAAGAAAUCUUUGAAU | 674 | 12135 | AUUCAAAGAUUUCUUUAAC | 2325 |
| 12135 | UGUGGCUAAAUCUGAGUUU | 675 | 12135 | UGUGGCUAAAUCUGAGUUU | 675 | 12153 | AAACUCAGAUUUAGCCACA | 2326 |
| 12153 | UGACCGUGAUGCUGCCAUG | 676 | 12153 | UGACCGUGAUGCUGCCAUG | 676 | 12171 | CAUGGCAGCAUCACGGUCA | 2327 |
| 12171 | GCAACGCAAGUUGGAAAAG | 677 | 12171 | GCAACGCAAGUUGGAAAAG | 677 | 12189 | CUUUUCCAACUUGCGUUGC | 2328 |
| 12189 | GAUGGCAGAUCAGGCUAUG | 678 | 12189 | GAUGGCAGAUCAGGCUAUG | 678 | 12207 | CAUAGCCUGAUCUGCCAUC | 2329 |
| 12207 | GACCCAAAUGUACAAACAG | 679 | 12207 | GACCCAAAUGUACAAACAG | 679 | 12225 | CUGUUUGUACAUUUGGGUC | 2330 |
| 12225 | GGCAAGAUCUGAGGACAAG | 680 | 12225 | GGCAAGAUCUGAGGACAAG | 680 | 12243 | CUUGUCCUCAGAUCUUGCC | 2331 |
| 12243 | GAGGGCAAAAGUAACUAGU | 681 | 12243 | GAGGGCAAAAGUAACUAGU | 681 | 12261 | ACUAGUUACUUUUGCCCUC | 2332 |
| 12261 | UGCUAUGCAAACAAUGCUC | 682 | 12261 | UGCUAUGCAAACAAUGCUC | 682 | 12279 | GAGCAUUGUUUGCAUAGCA | 2333 |
| 12279 | CUUCACUAUGCUUAGGAAG | 683 | 12279 | CUUCACUAUGCUUAGGAAG | 683 | 12297 | CUUCCUAAGCAUAGUGAAG | 2334 |
| 12297 | GCUUGAUAAUGAUGCACUU | 684 | 12297 | GCUUGAUAAUGAUGCACUU | 684 | 12315 | AAGUGCAUCAUUAUCAAGC | 2335 |
| 12315 | UAACAACAUUAUCAACAAU | 685 | 12315 | UAACAACAUUAUCAACAAU | 685 | 12333 | AUUGUUGAUAAUGUUGUUA | 2336 |
| 12333 | UGCGCGUGAUGGUUGUGUU | 686 | 12333 | UGCGCGUGAUGGUUGUGUU | 686 | 12351 | AACACAACCAUCACGCGCA | 2337 |
| 12351 | UCCACUCAACAUCAUACCA | 687 | 12351 | UCCACUCAACAUCAUACCA | 687 | 12369 | UGGUAUGAUGUUGAGUGGA | 2338 |
| 12369 | AUUGACUACAGCAGCCAAA | 688 | 12369 | AUUGACUACAGCAGCCAAA | 688 | 12387 | UUUGGCUGCUGUAGUCAAU | 2339 |
| 12387 | ACUCAUGGUUGUUGUCCCU | 689 | 12387 | ACUCAUGGUUGUUGUCCCU | 689 | 12405 | AGGGACAACAACCAUGAGU | 2340 |
| 12405 | UGAUUAUGGUACCUACAAG | 690 | 12405 | UGAUUAUGGUACCUACAAG | 690 | 12423 | CUUGUAGGUACCAUAAUCA | 2341 |
| 12423 | GAACACUUGUGAUGGUAAC | 691 | 12423 | GAACACUUGUGAUGGUAAC | 691 | 12441 | GUUACCAUCACAAGUGUUC | 2342 |
| 12441 | CACCUUUACAUAUGCAUCU | 692 | 12441 | CACCUUUACAUAUGCAUCU | 692 | 12459 | AGAUGCAUAUGUAAAGGUG | 2343 |
| 12459 | UGCACUCUGGGAAAUCCAG | 693 | 12459 | UGCACUCUGGGAAAUCCAG | 693 | 12477 | CUGGAUUUCCCAGAGUGCA | 2344 |
| 12477 | GCAAGUUGUUGAUGCGGAU | 694 | 12477 | GCAAGUUGUUGAUGCGGAU | 694 | 12495 | AUCCGCAUCAACAACUUGC | 2345 |
| 12495 | UAGCAAGAUUGUUCAACUU | 695 | 12495 | UAGCAAGAUUGUUCAACUU | 695 | 12513 | AAGUUGAACAAUCUUGCUA | 2346 |
| 12513 | UAGUGAAAUUAACAUGGAC | 696 | 12513 | UAGUGAAAUUAACAUGGAC | 696 | 12531 | GUCCAUGUUAAUUUCACUA | 2347 |
| 12531 | CAAUUCACCAAAUUUGGCU | 697 | 12531 | CAAUUCACCAAAUUUGGCU | 697 | 12549 | AGCCAAAUUUGGUGAAUUG | 2348 |
| 12549 | UUGGCCUCUUAUUGUUACA | 698 | 12549 | UUGGCCUCUUAUUGUUACA | 698 | 12567 | UGUAACAAUAAGAGGCCAA | 2349 |
| 12567 | AGCUCUAAGAGCCAACUCA | 699 | 12567 | AGCUCUAAGAGCCAACUCA | 699 | 12585 | UGAGUUGGCUCUUAGAGCU | 2350 |
| 12585 | AGCUGUUAAACUACAGAAU | 700 | 12585 | AGCUGUUAAACUACAGAAU | 700 | 12603 | AUUCUGUAGUUUAACAGCU | 2351 |
| 12603 | UAAUGAACUGAGUCCAGUA | 701 | 12603 | UAAUGAACUGAGUCCAGUA | 701 | 12621 | UACUGGACUCAGUUCAUUA | 2352 |
| 12621 | AGCACUACGACAGAUGUCC | 702 | 12621 | AGCACUACGACAGAUGUCC | 702 | 12639 | GGACAUCUGUCGUAGUGCU | 2353 |
| 12639 | CUGUGCGGCUGGUACCACA | 703 | 12639 | CUGUGCGGCUGGUACCACA | 703 | 12657 | UGUGGUACCAGCCGCACAG | 2354 |
| 12657 | ACAAACAGCUUGUACUGAU | 704 | 12657 | ACAAACAGCUUGUACUGAU | 704 | 12675 | AUCAGUACAAGCUGUUUGU | 2355 |
| 12675 | UGACAAUGCACUUGCCUAC | 705 | 12675 | UGACAAUGCACUUGCCUAC | 705 | 12693 | GUAGGCAAGUGCAUUGUCA | 2356 |
| 12693 | CUAUAACAAUUCGAAGGGA | 706 | 12693 | CUAUAACAAUUCGAAGGGA | 706 | 12711 | UCCCUUCGAAUUGUUAUAG | 2357 |
| 12711 | AGGUAGGUUUGUGCUGGCA | 707 | 12711 | AGGUAGGUUUGUGCUGGCA | 707 | 12729 | UGCCAGCACAAACCUACCU | 2358 |
| 12729 | AUUACUAUCAGACCACCAA | 708 | 12729 | AUUACUAUCAGACCACCAA | 708 | 12747 | UUGGUGGUCUGAUAGUAAU | 2359 |
| 12747 | AGAUCUCAAAUGGGCUAGA | 709 | 12747 | AGAUCUCAAAUGGGCUAGA | 709 | 12765 | UCUAGCCCAUUUGAGAUCU | 2360 |
| 12765 | AUUCCCUAAGAGUGAUGGU | 710 | 12765 | AUUCCCUAAGAGUGAUGGU | 710 | 12783 | ACCAUCACUCUUAGGGAAU | 2361 |
| 12783 | UACAGGUACAAUUUACACA | 711 | 12783 | UACAGGUACAAUUUACACA | 711 | 12801 | UGUGUAAAUUGUACCUGUA | 2362 |
| 12801 | AGAACUGGAACCACCUUGU | 712 | 12801 | AGAACUGGAACCACCUUGU | 712 | 12819 | ACAAGGUGGUUCCAGUUCU | 2363 |
| 12819 | UAGGUUUGUUACAGACACA | 713 | 12819 | UAGGUUUGUUACAGACACA | 713 | 12837 | UGUGUCUGUAACAAACCUA | 2364 |
| 12837 | ACCAAAAGGGCCUAAAGUG | 714 | 12837 | ACCAAAAGGGCCUAAAGUG | 714 | 12855 | CACUUUAGGCCCUUUUGGU | 2365 |
| 12855 | GAAAUACUUGUACUUCAUC | 715 | 12855 | GAAAUACUUGUACUUCAUC | 715 | 12873 | GAUGAAGUACAAGUAUUUC | 2366 |
| 12873 | CAAAGGCUUAAACAACCUA | 716 | 12873 | CAAAGGCUUAAACAACCUA | 716 | 12891 | UAGGUUGUUUAAGCCUUUG | 2367 |
| 12891 | AAAUAGAGGUAUGGUGCUG | 717 | 12891 | AAAUAGAGGUAUGGUGCUG | 717 | 12909 | CAGCACCAUACCUCUAUUU | 2368 |
| 12909 | GGGCAGUUUAGCUGCUACA | 718 | 12909 | GGGCAGUUUAGCUGCUACA | 718 | 12927 | UGUAGCAGCUAAACUGCCC | 2369 |
| 12927 | AGUACGUCUUCAGGCUGGA | 719 | 12927 | AGUACGUCUUCAGGCUGGA | 719 | 12945 | UCCAGCCUGAAGACGUACU | 2370 |
| 12945 | AAAUGCUACAGAAGUACCU | 720 | 12945 | AAAUGCUACAGAAGUACCU | 720 | 12963 | AGGUACUUCUGUAGCAUUU | 2371 |
| 12963 | UGCCAAUUCAACUGUGCUU | 721 | 12963 | UGCCAAUUCAACUGUGCUU | 721 | 12981 | AAGCACAGUUGAAUUGGCA | 2372 |
| 12981 | UUCCUUCUGUGCUUUUGCA | 722 | 12981 | UUCCUUCUGUGCUUUUGCA | 722 | 12999 | UGCAAAAGCACAGAAGGAA | 2373 |
| 12999 | AGUAGACCCUGCUAAAGCA | 723 | 12999 | AGUAGACCCUGCUAAAGCA | 723 | 13017 | UGCUUUAGCAGGGUCUACU | 2374 |
| 13017 | AUAUAAGGAUUACCUAGCA | 724 | 13017 | AUAUAAGGAUUACCUAGCA | 724 | 13035 | UGCUAGGUAAUCCUUAUAU | 2375 |
| 13035 | AAGUGGAGGACAACCAAUC | 725 | 13035 | AAGUGGAGGACAACCAAUC | 725 | 13053 | GAUUGGUUGUCCUCCACUU | 2376 |
| 13053 | CACCAACUGUGUGAAGAUG | 726 | 13053 | CACCAACUGUGUGAAGAUG | 726 | 13071 | CAUCUUCACACAGUUGGUG | 2377 |
| 13071 | GUUGUGUACACACACUGGU | 727 | 13071 | GUUGUGUACACACACUGGU | 727 | 13089 | ACCAGUGUGUGUACACAAC | 2378 |
| 13089 | UACAGGACAGGCAAUUACU | 728 | 13089 | UACAGGACAGGCAAUUACU | 728 | 13107 | AGUAAUUGCCUGUCCUGUA | 2379 |
| 13107 | UGUAACACCAGAAGCUAAC | 729 | 13107 | UGUAACACCAGAAGCUAAC | 729 | 13125 | GUUAGCUUCUGGUGUUACA | 2380 |
| 13125 | CAUGGACCAAGAGUCCUUU | 730 | 13125 | CAUGGACCAAGAGUCCUUU | 730 | 13143 | AAAGGACUCUUGGUCCAUG | 2381 |
| 13143 | UGGUGGUGCUUCAUGUUGU | 731 | 13143 | UGGUGGUGCUUCAUGUUGU | 731 | 13161 | ACAACAUGAAGCACCACCA | 2382 |
| 13161 | UCUGUAUUGUAGAUGCCAC | 732 | 13161 | UCUGUAUUGUAGAUGCCAC | 732 | 13179 | GUGGCAUCUACAAUACAGA | 2383 |
| 13179 | CAUUGACCAUCCAAAUCCU | 733 | 13179 | CAUUGACCAUCCAAAUCCU | 733 | 13197 | AGGAUUUGGAUGGUCAAUG | 2384 |
| 13197 | UAAAGGAUUCUGUGACUUG | 734 | 13197 | UAAAGGAUUCUGUGACUUG | 734 | 13215 | CAAGUCACAGAAUCCUUUA | 2385 |
| 13215 | GAAAGGUAAGUACGUCCAA | 735 | 13215 | GAAAGGUAAGUACGUCCAA | 735 | 13233 | UUGGACGUACUUACCUUUC | 2386 |
| 13233 | AAUACCUACCACUUGUGCU | 736 | 13233 | AAUACCUACCACUUGUGCU | 736 | 13251 | AGCACAAGUGGUAGGUAUU | 2387 |
| 13251 | UAAUGACCCAGUGGGUUUU | 737 | 13251 | UAAUGACCCAGUGGGUUUU | 737 | 13269 | AAAACCCACUGGGUCAUUA | 2388 |
| 13269 | UACACUUAGAAACACAGUC | 738 | 13269 | UACACUUAGAAACACAGUC | 738 | 13287 | GACUGUGUUUCUAAGUGUA | 2389 |
| 13287 | CUGUACCGUCUGCGGAAUG | 739 | 13287 | CUGUACCGUCUGCGGAAUG | 739 | 13305 | CAUUCCGCAGACGGUACAG | 2390 |
| 13305 | GUGGAAAGGUUAUGGCUGU | 740 | 13305 | GUGGAAAGGUUAUGGCUGU | 740 | 13323 | ACAGCCAUAACCUUUCCAC | 2391 |
| 13323 | UAGUUGUGACCAACUCCGC | 741 | 13323 | UAGUUGUGACCAACUCCGC | 741 | 13341 | GCGGAGUUGGUCACAACUA | 2392 |
| 13341 | CGAACCCUUGAUGCAGUCU | 742 | 13341 | CGAACCCUUGAUGCAGUCU | 742 | 13359 | AGACUGCAUCAAGGGUUCG | 2393 |
| 13359 | UGCGGAUGCAUCAACGUUU | 743 | 13359 | UGCGGAUGCAUCAACGUUU | 743 | 13377 | AAACGUUGAUGCAUCCGCA | 2394 |
| 13377 | UUUAAACGGGUUUGCGGUG | 744 | 13377 | UUUAAACGGGUUUGCGGUG | 744 | 13395 | CACCGCAAACCCGUUUAAA | 2395 |
| 13395 | GUAAGUGCAGCCCGUCUUA | 745 | 13395 | GUAAGUGCAGCCCGUCUUA | 745 | 13413 | UAAGACGGGCUGCACUUAC | 2396 |
| 13413 | ACACCGUGCGGCACAGGCA | 746 | 13413 | ACACCGUGCGGCACAGGCA | 746 | 13431 | UGCCUGUGCCGCACGGUGU | 2397 |
| 13431 | ACUAGUACUGAUGUCGUCU | 747 | 13431 | ACUAGUACUGAUGUCGUCU | 747 | 13449 | AGACGACAUCAGUACUAGU | 2398 |
| 13449 | UACAGGGCUUUUGAUAUUU | 748 | 13449 | UACAGGGCUUUUGAUAUUU | 748 | 13467 | AAAUAUCAAAAGCCCUGUA | 2399 |
| 13467 | UACAACGAAAAAGUUGCUG | 749 | 13467 | UACAACGAAAAAGUUGCUG | 749 | 13485 | CAGCAACUUUUUCGUUGUA | 2400 |
| 13485 | GGUUUUGCAAAGUUCCUAA | 750 | 13485 | GGUUUUGCAAAGUUCCUAA | 750 | 13503 | UUAGGAACUUUGCAAAACC | 2401 |
| 13503 | AAAACUAAUUGCUGUCGCU | 751 | 13503 | AAAACUAAUUGCUGUCGCU | 751 | 13521 | AGCGACAGCAAUUAGUUUU | 2402 |
| 13521 | UUCCAGGAGAAGGAUGAGG | 752 | 13521 | UUCCAGGAGAAGGAUGAGG | 752 | 13539 | CCUCAUCCUUCUCCUGGAA | 2403 |
| 13539 | GAAGGCAAUUUAUUAGACU | 753 | 13539 | GAAGGCAAUUUAUUAGACU | 753 | 13557 | AGUCUAAUAAAUUGCCUUC | 2404 |
| 13557 | UCUUACUUUGUAGUUAAGA | 754 | 13557 | UCUUACUUUGUAGUUAAGA | 754 | 13575 | UCUUAACUACAAAGUAAGA | 2405 |
| 13575 | AGGCAUACUAUGUCUAACU | 755 | 13575 | AGGCAUACUAUGUCUAACU | 755 | 13593 | AGUUAGACAUAGUAUGCCU | 2406 |
| 13593 | UACCAACAUGAAGAGACUA | 756 | 13593 | UACCAACAUGAAGAGACUA | 756 | 13611 | UAGUCUCUUCAUGUUGGUA | 2407 |
| 13611 | AUUUAUAACUUGGUUAAAG | 757 | 13611 | AUUUAUAACUUGGUUAAAG | 757 | 13629 | CUUUAACCAAGUUAUAAAU | 2408 |
| 13629 | GAUUGUCCAGCGGUUGCUG | 758 | 13629 | GAUUGUCCAGCGGUUGCUG | 758 | 13647 | CAGCAACCGCUGGACAAUC | 2409 |
| 13647 | GUCCAUGACUUUUUCAAGU | 759 | 13647 | GUCCAUGACUUUUUCAAGU | 759 | 13665 | ACUUGAAAAAGUCAUGGAC | 2410 |
| 13665 | UUUAGAGUAGAUGGUGACA | 760 | 13665 | UUUAGAGUAGAUGGUGACA | 760 | 13683 | UGUCACCAUCUACUCUAAA | 2411 |
| 13683 | AUGGUACCACAUAUAUCAC | 761 | 13683 | AUGGUACCACAUAUAUCAC | 761 | 13701 | GUGAUAUAUGUGGUACCAU | 2412 |
| 13701 | CGUCAGCGUCUAACUAAAU | 762 | 13701 | CGUCAGCGUCUAACUAAAU | 762 | 13719 | AUUUAGUUAGACGCUGACG | 2413 |
| 13719 | UACACAAUGGCUGAUUUAG | 763 | 13719 | UACACAAUGGCUGAUUUAG | 763 | 13737 | CUAAAUCAGCCAUUGUGUA | 2414 |
| 13737 | GUCUAUGCUCUACGUCAUU | 764 | 13737 | GUCUAUGCUCUACGUCAUU | 764 | 13755 | AAUGACGUAGAGCAUAGAC | 2415 |
| 13755 | UUUGAUGAGGGUAAUUGUG | 765 | 13755 | UUUGAUGAGGGUAAUUGUG | 765 | 13773 | CACAAUUACCCUCAUCAAA | 2416 |
| 13773 | GAUACAUUAAAAGAAAUAC | 766 | 13773 | GAUACAUUAAAAGAAAUAC | 766 | 13791 | GUAUUUCUUUUAAUGUAUC | 2417 |
| 13791 | CUCGUCACAUACAAUUGCU | 767 | 13791 | CUCGUCACAUACAAUUGCU | 767 | 13809 | AGCAAUUGUAUGUGACGAG | 2418 |
| 13809 | UGUGAUGAUGAUUAUUUCA | 768 | 13809 | UGUGAUGAUGAUUAUUUCA | 768 | 13827 | UGAAAUAAUCAUCAUCACA | 2419 |
| 13827 | AAUAAGAAGGAUUGGUAUG | 769 | 13827 | AAUAAGAAGGAUUGGUAUG | 769 | 13845 | CAUACCAAUCCUUCUUAUU | 2420 |
| 13845 | GACUUCGUAGAGAAUCCUG | 770 | 13845 | GACUUCGUAGAGAAUCCUG | 770 | 13863 | CAGGAUUCUCUACGAAGUC | 2421 |
| 13863 | GACAUCUUACGCGUAUAUG | 771 | 13863 | GACAUCUUACGCGUAUAUG | 771 | 13881 | CAUAUACGCGUAAGAUGUC | 2422 |
| 13881 | GCUAACUUAGGUGAGCGUG | 772 | 13881 | GCUAACUUAGGUGAGCGUG | 772 | 13899 | CACGCUCACCUAAGUUAGC | 2423 |
| 13899 | GUACGCCAAUCAUUAUUAA | 773 | 13899 | GUACGCCAAUCAUUAUUAA | 773 | 13917 | UUAAUAAUGAUUGGCGUAC | 2424 |
| 13917 | AAGACUGUACAAUUCUGCG | 774 | 13917 | AAGACUGUACAAUUCUGCG | 774 | 13935 | CGCAGAAUUGUACAGUCUU | 2425 |
| 13935 | GAUGCUAUGCGUGAUGCAG | 775 | 13935 | GAUGCUAUGCGUGAUGCAG | 775 | 13953 | CUGCAUCACGCAUAGCAUC | 2426 |
| 13953 | GGCAUUGUAGGCGUACUGA | 776 | 13953 | GGCAUUGUAGGCGUACUGA | 776 | 13971 | UCAGUACGCCUACAAUGCC | 2427 |
| 13971 | ACAUUAGAUAAUCAGGAUC | 777 | 13971 | ACAUUAGAUAAUCAGGAUC | 777 | 13989 | GAUCCUGAUUAUCUAAUGU | 2428 |
| 13989 | CUUAAUGGGAACUGGUACG | 778 | 13989 | CUUAAUGGGAACUGGUACG | 778 | 14007 | CGUACCAGUUCCCAUUAAG | 2429 |
| 14007 | GAUUUCGGUGAUUUCGUAC | 779 | 14007 | GAUUUCGGUGAUUUCGUAC | 779 | 14025 | GUACGAAAUCACCGAAAUC | 2430 |
| 14025 | CAAGUAGCACCAGGCUGCG | 780 | 14025 | CAAGUAGCACCAGGCUGCG | 780 | 14043 | CGCAGCCUGGUGCUACUUG | 2431 |
| 14043 | GGAGUUCCUAUUGUGGAUU | 781 | 14043 | GGAGUUCCUAUUGUGGAUU | 781 | 14061 | AAUCCACAAUAGGAACUCC | 2432 |
| 14061 | UCAUAUUACUCAUUGCUGA | 782 | 14061 | UCAUAUUACUCAUUGCUGA | 782 | 14079 | UCAGCAAUGAGUAAUAUGA | 2433 |
| 14079 | AUGCCCAUCCUCACUUUGA | 783 | 14079 | AUGCCCAUCCUCACUUUGA | 783 | 14097 | UCAAAGUGAGGAUGGGCAU | 2434 |
| 14097 | ACUAGGGCAUUGGCUGCUG | 784 | 14097 | ACUAGGGCAUUGGCUGCUG | 784 | 14115 | CAGCAGCCAAUGCCCUAGU | 2435 |
| 14115 | GAGUCCCAUAUGGAUGCUG | 785 | 14115 | GAGUCCCAUAUGGAUGCUG | 785 | 14133 | CAGCAUCCAUAUGGGACUC | 2436 |
| 14133 | GAUCUCGCAAAACCACUUA | 786 | 14133 | GAUCUCGCAAAACCACUUA | 786 | 14151 | UAAGUGGUUUUGCGAGAUC | 2437 |
| 14151 | AUUAAGUGGGAUUUGCUGA | 787 | 14151 | AUUAAGUGGGAUUUGCUGA | 787 | 14169 | UCAGCAAAUCCCACUUAAU | 2438 |
| 14169 | AAAUAUGAUUUUACGGAAG | 788 | 14169 | AAAUAUGAUUUUACGGAAG | 788 | 14187 | CUUCCGUAAAAUCAUAUUU | 2439 |
| 14187 | GAGAGACUUUGUCUCUUCG | 789 | 14187 | GAGAGACUUUGUCUCUUCG | 789 | 14205 | CGAAGAGACAAAGUCUCUC | 2440 |
| 14205 | GACCGUUAUUUUAAAUAUU | 790 | 14205 | GACCGUUAUUUUAAAUAUU | 790 | 14223 | AAUAUUUAAAAUAACGGUC | 2441 |
| 14223 | UGGGACCAGACAUACCAUC | 791 | 14223 | UGGGACCAGACAUACCAUC | 791 | 14241 | GAUGGUAUGUCUGGUCCCA | 2442 |
| 14241 | CCCAAUUGUAUUAACUGUU | 792 | 14241 | CCCAAUUGUAUUAACUGUU | 792 | 14259 | AACAGUUAAUACAAUUGGG | 2443 |
| 14259 | UUGGAUGAUAGGUGUAUCC | 793 | 14259 | UUGGAUGAUAGGUGUAUCC | 793 | 14277 | GGAUACACCUAUCAUCCAA | 2444 |
| 14277 | CUUCAUUGUGCAAACUUUA | 794 | 14277 | CUUCAUUGUGCAAACUUUA | 794 | 14295 | UAAAGUUUGCACAAUGAAG | 2445 |
| 14295 | AAUGUGUUAUUUUCUACUG | 795 | 14295 | AAUGUGUUAUUUUCUACUG | 795 | 14313 | CAGUAGAAAAUAACACAUU | 2446 |
| 14313 | GUGUUUCCACCUACAAGUU | 796 | 14313 | GUGUUUCCACCUACAAGUU | 796 | 14331 | AACUUGUAGGUGGAAACAC | 2447 |
| 14331 | UUUGGACCACUAGUAAGAA | 797 | 14331 | UUUGGACCACUAGUAAGAA | 797 | 14349 | UUCUUACUAGUGGUCCAAA | 2448 |
| 14349 | AAAAUAUUUGUAGAUGGUG | 798 | 14349 | AAAAUAUUUGUAGAUGGUG | 798 | 14367 | CACCAUCUACAAAUAUUUU | 2449 |
| 14367 | GUUCCUUUUGUUGUUUCAA | 799 | 14367 | GUUCCUUUUGUUGUUUCAA | 799 | 14385 | UUGAAACAACAAAAGGAAC | 2450 |
| 14385 | ACUGGAUACCAUUUUCGUG | 800 | 14385 | ACUGGAUACCAUUUUCGUG | 800 | 14403 | CACGAAAAUGGUAUCCAGU | 2451 |
| 14403 | GAGUUAGGAGUCGUACAUA | 801 | 14403 | GAGUUAGGAGUCGUACAUA | 801 | 14421 | UAUGUACGACUCCUAACUC | 2452 |
| 14421 | AAUCAGGAUGUAAACUUAC | 802 | 14421 | AAUCAGGAUGUAAACUUAC | 802 | 14439 | GUAAGUUUACAUCCUGAUU | 2453 |
| 14439 | CAUAGCUCGCGUCUCAGUU | 803 | 14439 | CAUAGCUCGCGUCUCAGUU | 803 | 14457 | AACUGAGACGCGAGCUAUG | 2454 |
| 14457 | UUCAAGGAACUUUUAGUGU | 804 | 14457 | UUCAAGGAACUUUUAGUGU | 804 | 14475 | ACACUAAAAGUUCCUUGAA | 2455 |
| 14475 | UAUGCUGCUGAUCCAGCUA | 805 | 14475 | UAUGCUGCUGAUCCAGCUA | 805 | 14493 | UAGCUGGAUCAGCAGCAUA | 2456 |
| 14493 | AUGCAUGCAGCUUCUGGCA | 806 | 14493 | AUGCAUGCAGCUUCUGGCA | 806 | 14511 | UGCCAGAAGCUGCAUGCAU | 2457 |
| 14511 | AAUUUAUUGCUAGAUAAAC | 807 | 14511 | AAUUUAUUGCUAGAUAAAC | 807 | 14529 | GUUUAUCUAGCAAUAAAUU | 2458 |
| 14529 | CGCACUACAUGCUUUUCAG | 808 | 14529 | CGCACUACAUGCUUUUCAG | 808 | 14547 | CUGAAAAGCAUGUAGUGCG | 2459 |
| 14547 | GUAGCUGCACUAACAAACA | 809 | 14547 | GUAGCUGCACUAACAAACA | 809 | 14565 | UGUUUGUUAGUGCAGCUAC | 2460 |
| 14565 | AAUGUUGCUUUUCAAACUG | 810 | 14565 | AAUGUUGCUUUUCAAACUG | 810 | 14583 | CAGUUUGAAAAGCAACAUU | 2461 |
| 14583 | GUCAAACCCGGUAAUUUUA | 811 | 14583 | GUCAAACCCGGUAAUUUUA | 811 | 14601 | UAAAAUUACCGGGUUUGAC | 2462 |
| 14601 | AAUAAAGACUUUUAUGACU | 812 | 14601 | AAUAAAGACUUUUAUGACU | 812 | 14619 | AGUCAUAAAAGUCUUUAUU | 2463 |
| 14619 | UUUGCUGUGUCUAAAGGUU | 813 | 14619 | UUUGCUGUGUCUAAAGGUU | 813 | 14637 | AACCUUUAGACACAGCAAA | 2464 |
| 14637 | UUCUUUAAGGAAGGAAGUU | 814 | 14637 | UUCUUUAAGGAAGGAAGUU | 814 | 14655 | AACUUCCUUCCUUAAAGAA | 2465 |
| 14655 | UCUGUUGAACUAAAACACU | 815 | 14655 | UCUGUUGAACUAAAACACU | 815 | 14673 | AGUGUUUUAGUUCAACAGA | 2466 |
| 14673 | UUCUUCUUUGCUCAGGAUG | 816 | 14673 | UUCUUCUUUGCUCAGGAUG | 816 | 14691 | CAUCCUGAGCAAAGAAGAA | 2467 |
| 14691 | GGCAACGCUGCUAUCAGUG | 817 | 14691 | GGCAACGCUGCUAUCAGUG | 817 | 14709 | CACUGAUAGCAGCGUUGCC | 2468 |
| 14709 | GAUUAUGACUAUUAUCGUU | 818 | 14709 | GAUUAUGACUAUUAUCGUU | 818 | 14727 | AACGAUAAUAGUCAUAAUC | 2469 |
| 14727 | UAUAAUCUGCCAACAAUGU | 819 | 14727 | UAUAAUCUGCCAACAAUGU | 819 | 14745 | ACAUUGUUGGCAGAUUAUA | 2470 |
| 14745 | UGUGAUAUCAGACAACUCC | 820 | 14745 | UGUGAUAUCAGACAACUCC | 820 | 14763 | GGAGUUGUCUGAUAUCACA | 2471 |
| 14763 | CUAUUCGUAGUUGAAGUUG | 821 | 14763 | CUAUUCGUAGUUGAAGUUG | 821 | 14781 | CAACUUCAACUACGAAUAG | 2472 |
| 14781 | GUUGAUAAAUACUUUGAUU | 822 | 14781 | GUUGAUAAAUACUUUGAUU | 822 | 14799 | AAUCAAAGUAUUUAUCAAC | 2473 |
| 14799 | UGUUACGAUGGUGGCUGUA | 823 | 14799 | UGUUACGAUGGUGGCUGUA | 823 | 14817 | UACAGCCACCAUCGUAACA | 2474 |
| 14817 | AUUAAUGCCAACCAAGUAA | 824 | 14817 | AUUAAUGCCAACCAAGUAA | 824 | 14835 | UUACUUGGUUGGCAUUAAU | 2475 |
| 14835 | AUCGUUAACAAUCUGGAUA | 825 | 14835 | AUCGUUAACAAUCUGGAUA | 825 | 14853 | UAUCCAGAUUGUUAACGAU | 2476 |
| 14853 | AAAUCAGCUGGUUUCCCAU | 826 | 14853 | AAAUCAGCUGGUUUCCCAU | 826 | 14871 | AUGGGAAACCAGCUGAUUU | 2477 |
| 14871 | UUUAAUAAAUGGGGUAAGG | 827 | 14871 | UUUAAUAAAUGGGGUAAGG | 827 | 14889 | CCUUACCCCAUUUAUUAAA | 2478 |
| 14889 | GCUAGACUUUAUUAUGACU | 828 | 14889 | GCUAGACUUUAUUAUGACU | 828 | 14907 | AGUCAUAAUAAAGUCUAGC | 2479 |
| 14907 | UCAAUGAGUUAUGAGGAUC | 829 | 14907 | UCAAUGAGUUAUGAGGAUC | 829 | 14925 | GAUCCUCAUAACUCAUUGA | 2480 |
| 14925 | CAAGAUGCACUUUUCGCGU | 830 | 14925 | CAAGAUGCACUUUUCGCGU | 830 | 14943 | ACGCGAAAAGUGCAUCUUG | 2481 |
| 14943 | UAUACUAAGCGUAAUGUCA | 831 | 14943 | UAUACUAAGCGUAAUGUCA | 831 | 14961 | UGACAUUACGCUUAGUAUA | 2482 |
| 14961 | AUCCCUACUAUAACUCAAA | 832 | 14961 | AUCCCUACUAUAACUCAAA | 832 | 14979 | UUUGAGUUAUAGUAGGGAU | 2483 |
| 14979 | AUGAAUCUUAAGUAUGCCA | 833 | 14979 | AUGAAUCUUAAGUAUGCCA | 833 | 14997 | UGGCAUACUUAAGAUUCAU | 2484 |
| 14997 | AUUAGUGCAAAGAAUAGAG | 834 | 14997 | AUUAGUGCAAAGAAUAGAG | 834 | 15015 | CUCUAUUCUUUGCACUAAU | 2485 |
| 15015 | GCUCGCACCGUAGCUGGUG | 835 | 15015 | GCUCGCACCGUAGCUGGUG | 835 | 15033 | CACCAGCUACGGUGCGAGC | 2486 |
| 15033 | GUCUCUAUCUGUAGUACUA | 836 | 15033 | GUCUCUAUCUGUAGUACUA | 836 | 15051 | UAGUACUACAGAUAGAGAC | 2487 |
| 15051 | AUGACAAAUAGACAGUUUC | 837 | 15051 | AUGACAAAUAGACAGUUUC | 837 | 15069 | GAAACUGUCUAUUUGUCAU | 2488 |
| 15069 | CAUCAGAAAUUAUUGAAGU | 838 | 15069 | CAUCAGAAAUUAUUGAAGU | 838 | 15087 | ACUUCAAUAAUUUCUGAUG | 2489 |
| 15087 | UCAAUAGCCGCCACUAGAG | 839 | 15087 | UCAAUAGCCGCCACUAGAG | 839 | 15105 | CUCUAGUGGCGGCUAUUGA | 2490 |
| 15105 | GGAGCUACUGUGGUAAUUG | 840 | 15105 | GGAGCUACUGUGGUAAUUG | 840 | 15123 | CAAUUACCACAGUAGCUCC | 2491 |
| 15123 | GGAACAAGCAAGUUUUACG | 841 | 15123 | GGAACAAGCAAGUUUUACG | 841 | 15141 | CGUAAAACUUGCUUGUUCC | 2492 |
| 15141 | GGUGGCUGGCAUAAUAUGU | 842 | 15141 | GGUGGCUGGCAUAAUAUGU | 842 | 15159 | ACAUAUUAUGCCAGCCACC | 2493 |
| 15159 | UUAAAAACUGUUUACAGUG | 843 | 15159 | UUAAAAACUGUUUACAGUG | 843 | 15177 | CACUGUAAACAGUUUUUAA | 2494 |
| 15177 | GAUGUAGAAACUCCACACC | 844 | 15177 | GAUGUAGAAACUCCACACC | 844 | 15195 | GGUGUGGAGUUUCUACAUC | 2495 |
| 15195 | CUUAUGGGUUGGGAUUAUC | 845 | 15195 | CUUAUGGGUUGGGAUUAUC | 845 | 15213 | GAUAAUCCCAACCCAUAAG | 2496 |
| 15213 | CCAAAAUGUGACAGAGCCA | 846 | 15213 | CCAAAAUGUGACAGAGCCA | 846 | 15231 | UGGCUCUGUCACAUUUUGG | 2497 |
| 15231 | AUGCCUAACAUGCUUAGGA | 847 | 15231 | AUGCCUAACAUGCUUAGGA | 847 | 15249 | UCCUAAGCAUGUUAGGCAU | 2498 |
| 15249 | AUAAUGGCCUCUCUUGUUC | 848 | 15249 | AUAAUGGCCUCUCUUGUUC | 848 | 15267 | GAACAAGAGAGGCCAUUAU | 2499 |
| 15267 | CUUGCUCGCAAACAUAACA | 849 | 15267 | CUUGCUCGCAAACAUAACA | 849 | 15285 | UGUUAUGUUUGCGAGCAAG | 2500 |
| 15285 | ACUUGCUGUAACUUAUCAC | 850 | 15285 | ACUUGCUGUAACUUAUCAC | 850 | 15303 | GUGAUAAGUUACAGCAAGU | 2501 |
| 15303 | CACCGUUUCUACAGGUUAG | 851 | 15303 | CACCGUUUCUACAGGUUAG | 851 | 15321 | CUAACCUGUAGAAACGGUG | 2502 |
| 15321 | GCUAACGAGUGUGCGCAAG | 852 | 15321 | GCUAACGAGUGUGCGCAAG | 852 | 15339 | CUUGCGCACACUCGUUAGC | 2503 |
| 15339 | GUAUUAAGUGAGAUGGUCA | 853 | 15339 | GUAUUAAGUGAGAUGGUCA | 853 | 15357 | UGACCAUCUCACUUAAUAC | 2504 |
| 15357 | AUGUGUGGCGGCUCACUAU | 854 | 15357 | AUGUGUGGCGGCUCACUAU | 854 | 15375 | AUAGUGAGCCGCCACACAU | 2505 |
| 15375 | UAUGUUAAACCAGGUGGAA | 855 | 15375 | UAUGUUAAACCAGGUGGAA | 855 | 15393 | UUCCACCUGGUUUAACAUA | 2506 |
| 15393 | ACAUCAUCCGGUGAUGCUA | 856 | 15393 | ACAUCAUCCGGUGAUGCUA | 856 | 15411 | UAGCAUCACCGGAUGAUGU | 2507 |
| 15411 | ACAACUGCUUAUGCUAAUA | 857 | 15411 | ACAACUGCUUAUGCUAAUA | 857 | 15429 | UAUUAGCAUAAGCAGUUGU | 2508 |
| 15429 | AGUGUCUUUAACAUUUGUC | 858 | 15429 | AGUGUCUUUAACAUUUGUC | 858 | 15447 | GACAAAUGUUAAAGACACU | 2509 |
| 15447 | CAAGCUGUUACAGCCAAUG | 859 | 15447 | CAAGCUGUUACAGCCAAUG | 859 | 15465 | CAUUGGCUGUAACAGCUUG | 2510 |
| 15465 | GUAAAUGCACUUCUUUCAA | 860 | 15465 | GUAAAUGCACUUCUUUCAA | 860 | 15483 | UUGAAAGAAGUGCAUUUAC | 2511 |
| 15483 | ACUGAUGGUAAUAAGAUAG | 861 | 15483 | ACUGAUGGUAAUAAGAUAG | 861 | 15501 | CUAUCUUAUUACCAUCAGU | 2512 |
| 15501 | GCUGACAAGUAUGUCCGCA | 862 | 15501 | GCUGACAAGUAUGUCCGCA | 862 | 15519 | UGCGGACAUACUUGUCAGC | 2513 |
| 15519 | AAUCUACAACACAGGCUCU | 863 | 15519 | AAUCUACAACACAGGCUCU | 863 | 15537 | AGAGCCUGUGUUGUAGAUU | 2514 |
| 15537 | UAUGAGUGUCUCUAUAGAA | 864 | 15537 | UAUGAGUGUCUCUAUAGAA | 864 | 15555 | UUCUAUAGAGACACUCAUA | 2515 |
| 15555 | AAUAGGGAUGUUGAUCAUG | 865 | 15555 | AAUAGGGAUGUUGAUCAUG | 865 | 15573 | CAUGAUCAACAUCCCUAUU | 2516 |
| 15573 | GAAUUCGUGGAUGAGUUUU | 866 | 15573 | GAAUUCGUGGAUGAGUUUU | 866 | 15591 | AAAACUCAUCCACGAAUUC | 2517 |
| 15591 | UACGCUUACCUGCGUAAAC | 867 | 15591 | UACGCUUACCUGCGUAAAC | 867 | 15609 | GUUUACGCAGGUAAGCGUA | 2518 |
| 15609 | CAUUUCUCCAUGAUGAUUC | 868 | 15609 | CAUUUCUCCAUGAUGAUUC | 868 | 15627 | GAAUCAUCAUGGAGAAAUG | 2519 |
| 15627 | CUUUCUGAUGAUGCCGUUG | 869 | 15627 | CUUUCUGAUGAUGCCGUUG | 869 | 15645 | CAACGGCAUCAUCAGAAAG | 2520 |
| 15645 | GUGUGCUAUAACAGUAACU | 870 | 15645 | GUGUGCUAUAACAGUAACU | 870 | 15663 | AGUUACUGUUAUAGCACAC | 2521 |
| 15663 | UAUGCGGCUCAAGGUUUAG | 871 | 15663 | UAUGCGGCUCAAGGUUUAG | 871 | 15681 | CUAAACCUUGAGCCGCAUA | 2522 |
| 15681 | GUAGCUAGCAUUAAGAACU | 872 | 15681 | GUAGCUAGCAUUAAGAACU | 872 | 15699 | AGUUCUUAAUGCUAGCUAC | 2523 |
| 15699 | UUUAAGGCAGUUCUUUAUU | 873 | 15699 | UUUAAGGCAGUUCUUUAUU | 873 | 15717 | AAUAAAGAACUGCCUUAAA | 2524 |
| 15717 | UAUCAAAAUAAUGUGUUCA | 874 | 15717 | UAUCAAAAUAAUGUGUUCA | 874 | 15735 | UGAACACAUUAUUUUGAUA | 2525 |
| 15735 | AUGUCUGAGGCAAAAUGUU | 875 | 15735 | AUGUCUGAGGCAAAAUGUU | 875 | 15753 | AACAUUUUGCCUCAGACAU | 2526 |
| 15753 | UGGACUGAGACUGACCUUA | 876 | 15753 | UGGACUGAGACUGACCUUA | 876 | 15771 | UAAGGUCAGUCUCAGUCCA | 2527 |
| 15771 | ACUAAAGGACCUCACGAAU | 877 | 15771 | ACUAAAGGACCUCACGAAU | 877 | 15789 | AUUCGUGAGGUCCUUUAGU | 2528 |
| 15789 | UUUUGCUCACAGCAUACAA | 878 | 15789 | UUUUGCUCACAGCAUACAA | 878 | 15807 | UUGUAUGCUGUGAGCAAAA | 2529 |
| 15807 | AUGCUAGUUAAACAAGGAG | 879 | 15807 | AUGCUAGUUAAACAAGGAG | 879 | 15825 | CUCCUUGUUUAACUAGCAU | 2530 |
| 15825 | GAUGAUUACGUGUACCUGC | 880 | 15825 | GAUGAUUACGUGUACCUGC | 880 | 15843 | GCAGGUACACGUAAUCAUC | 2531 |
| 15843 | CCUUACCCAGAUCCAUCAA | 881 | 15843 | CCUUACCCAGAUCCAUCAA | 881 | 15861 | UUGAUGGAUCUGGGUAAGG | 2532 |
| 15861 | AGAAUAUUAGGCGCAGGCU | 882 | 15861 | AGAAUAUUAGGCGCAGGCU | 882 | 15879 | AGCCUGCGCCUAAUAUUCU | 2533 |
| 15879 | UGUUUUGUCGAUGAUAUUG | 883 | 15879 | UGUUUUGUCGAUGAUAUUG | 883 | 15897 | CAAUAUCAUCGACAAAACA | 2534 |
| 15897 | GUCAAAACAGAUGGUACAC | 884 | 15897 | GUCAAAACAGAUGGUACAC | 884 | 15915 | GUGUACCAUCUGUUUUGAC | 2535 |
| 15915 | CUUAUGAUUGAAAGGUUCG | 885 | 15915 | CUUAUGAUUGAAAGGUUCG | 885 | 15933 | CGAACCUUUCAAUCAUAAG | 2536 |
| 15933 | GUGUCACUGGCUAUUGAUG | 886 | 15933 | GUGUCACUGGCUAUUGAUG | 886 | 15951 | CAUCAAUAGCCAGUGACAC | 2537 |
| 15951 | GCUUACCCACUUACAAAAC | 887 | 15951 | GCUUACCCACUUACAAAAC | 887 | 15969 | GUUUUGUAAGUGGGUAAGC | 2538 |
| 15969 | CAUCCUAAUCAGGAGUAUG | 888 | 15969 | CAUCCUAAUCAGGAGUAUG | 888 | 15987 | CAUACUCCUGAUUAGGAUG | 2539 |
| 15987 | GCUGAUGUCUUUCACUUGU | 889 | 15987 | GCUGAUGUCUUUCACUUGU | 889 | 16005 | ACAAGUGAAAGACAUCAGC | 2540 |
| 16005 | UAUUUACAAUACAUUAGAA | 890 | 16005 | UAUUUACAAUACAUUAGAA | 890 | 16023 | UUCUAAUGUAUUGUAAAUA | 2541 |
| 16023 | AAGUUACAUGAUGAGCUUA | 891 | 16023 | AAGUUACAUGAUGAGCUUA | 891 | 16041 | UAAGCUCAUCAUGUAACUU | 2542 |
| 16041 | ACUGGCCACAUGUUGGACA | 892 | 16041 | ACUGGCCACAUGUUGGACA | 892 | 16059 | UGUCCAACAUGUGGCCAGU | 2543 |
| 16059 | AUGUAUUCCGUAAUGCUAA | 893 | 16059 | AUGUAUUCCGUAAUGCUAA | 893 | 16077 | UUAGCAUUACGGAAUACAU | 2544 |
| 16077 | ACUAAUGAUAACACCUCAC | 894 | 16077 | ACUAAUGAUAACACCUCAC | 894 | 16095 | GUGAGGUGUUAUCAUUAGU | 2545 |
| 16095 | CGGUACUGGGAACCUGAGU | 895 | 16095 | CGGUACUGGGAACCUGAGU | 895 | 16113 | ACUCAGGUUCCCAGUACCG | 2546 |
| 16113 | UUUUAUGAGGCUAUGUACA | 896 | 16113 | UUUUAUGAGGCUAUGUACA | 896 | 16131 | UGUACAUAGCCUCAUAAAA | 2547 |
| 16131 | ACACCACAUACAGUCUUGC | 897 | 16131 | ACACCACAUACAGUCUUGC | 897 | 16149 | GCAAGACUGUAUGUGGUGU | 2548 |
| 16149 | CAGGCUGUAGGUGCUUGUG | 898 | 16149 | CAGGCUGUAGGUGCUUGUG | 898 | 16167 | CACAAGCACCUACAGCCUG | 2549 |
| 16167 | GUAUUGUGCAAUUCACAGA | 899 | 16167 | GUAUUGUGCAAUUCACAGA | 899 | 16185 | UCUGUGAAUUGCACAAUAC | 2550 |
| 16185 | ACUUCACUUCGUUGCGGUG | 900 | 16185 | ACUUCACUUCGUUGCGGUG | 900 | 16203 | CACCGCAACGAAGUGAAGU | 2551 |
| 16203 | GCCUGUAUUAGGAGACCAU | 901 | 16203 | GCCUGUAUUAGGAGACCAU | 901 | 16221 | AUGGUCUCCUAAUACAGGC | 2552 |
| 16221 | UUCCUAUGUUGCAAGUGCU | 902 | 16221 | UUCCUAUGUUGCAAGUGCU | 902 | 16239 | AGCACUUGCAACAUAGGAA | 2553 |
| 16239 | UGCUAUGACCAUGUCAUUU | 903 | 16239 | UGCUAUGACCAUGUCAUUU | 903 | 16257 | AAAUGACAUGGUCAUAGCA | 2554 |
| 16257 | UCAACAUCACACAAAUUAG | 904 | 16257 | UCAACAUCACACAAAUUAG | 904 | 16275 | CUAAUUUGUGUGAUGUUGA | 2555 |
| 16275 | GUGUUGUCUGUUAAUCCCU | 905 | 16275 | GUGUUGUCUGUUAAUCCCU | 905 | 16293 | AGGGAUUAACAGACAACAC | 2556 |
| 16293 | UAUGUUUGCAAUGCCCCAG | 906 | 16293 | UAUGUUUGCAAUGCCCCAG | 906 | 16311 | CUGGGGCAUUGCAAACAUA | 2557 |
| 16311 | GGUUGUGAUGUCACUGAUG | 907 | 16311 | GGUUGUGAUGUCACUGAUG | 907 | 16329 | CAUCAGUGACAUCACAACC | 2558 |
| 16329 | GUGACACAACUGUAUCUAG | 908 | 16329 | GUGACACAACUGUAUCUAG | 908 | 16347 | CUAGAUACAGUUGUGUCAC | 2559 |
| 16347 | GGAGGUAUGAGCUAUUAUU | 909 | 16347 | GGAGGUAUGAGCUAUUAUU | 909 | 16365 | AAUAAUAGCUCAUACCUCC | 2560 |
| 16365 | UGCAAGUCACAUAAGCCUC | 910 | 16365 | UGCAAGUCACAUAAGCCUC | 910 | 16383 | GAGGCUUAUGUGACUUGCA | 2561 |
| 16383 | CCCAUUAGUUUUCCAUUAU | 911 | 16383 | CCCAUUAGUUUUCCAUUAU | 911 | 16401 | AUAAUGGAAAACUAAUGGG | 2562 |
| 16401 | UGUGCUAAUGGUCAGGUUU | 912 | 16401 | UGUGCUAAUGGUCAGGUUU | 912 | 16419 | AAACCUGACCAUUAGCACA | 2563 |
| 16419 | UUUGGUUUAUACAAAAACA | 913 | 16419 | UUUGGUUUAUACAAAAACA | 913 | 16437 | UGUUUUUGUAUAAACCAAA | 2564 |
| 16437 | ACAUGUGUAGGCAGUGACA | 914 | 16437 | ACAUGUGUAGGCAGUGACA | 914 | 16455 | UGUCACUGCCUACACAUGU | 2565 |
| 16455 | AAUGUCACUGACUUCAAUG | 915 | 16455 | AAUGUCACUGACUUCAAUG | 915 | 16473 | CAUUGAAGUCAGUGACAUU | 2566 |
| 16473 | GCGAUAGCAACAUGUGAUU | 916 | 16473 | GCGAUAGCAACAUGUGAUU | 916 | 16491 | AAUCACAUGUUGCUAUCGC | 2567 |
| 16491 | UGGACUAAUGCUGGCGAUU | 917 | 16491 | UGGACUAAUGCUGGCGAUU | 917 | 16509 | AAUCGCCAGCAUUAGUCCA | 2568 |
| 16509 | UACAUACUUGCCAACACUU | 918 | 16509 | UACAUACUUGCCAACACUU | 918 | 16527 | AAGUGUUGGCAAGUAUGUA | 2569 |
| 16527 | UGUACUGAGAGACUCAAGC | 919 | 16527 | UGUACUGAGAGACUCAAGC | 919 | 16545 | GCUUGAGUCUCUCAGUACA | 2570 |
| 16545 | CUUUUCGCAGCAGAAACGC | 920 | 16545 | CUUUUCGCAGCAGAAACGC | 920 | 16563 | GCGUUUCUGCUGCGAAAAG | 2571 |
| 16563 | CUCAAAGCCACUGAGGAAA | 921 | 16563 | CUCAAAGCCACUGAGGAAA | 921 | 16581 | UUUCCUCAGUGGCUUUGAG | 2572 |
| 16581 | ACAUUUAAGCUGUCAUAUG | 922 | 16581 | ACAUUUAAGCUGUCAUAUG | 922 | 16599 | CAUAUGACAGCUUAAAUGU | 2573 |
| 16599 | GGUAUUGCCACUGUACGCG | 923 | 16599 | GGUAUUGCCACUGUACGCG | 923 | 16617 | CGCGUACAGUGGCAAUACC | 2574 |
| 16617 | GAAGUACUCUCUGACAGAG | 924 | 16617 | GAAGUACUCUCUGACAGAG | 924 | 16635 | CUCUGUCAGAGAGUACUUC | 2575 |
| 16635 | GAAUUGCAUCUUUCAUGGG | 925 | 16635 | GAAUUGCAUCUUUCAUGGG | 925 | 16653 | CCCAUGAAAGAUGCAAUUC | 2576 |
| 16653 | GAGGUUGGAAAACCUAGAC | 926 | 16653 | GAGGUUGGAAAACCUAGAC | 926 | 16671 | GUCUAGGUUUUCCAACCUC | 2577 |
| 16671 | CCACCAUUGAACAGAAACU | 927 | 16671 | CCACCAUUGAACAGAAACU | 927 | 16689 | AGUUUCUGUUCAAUGGUGG | 2578 |
| 16689 | UAUGUCUUUACUGGUUACC | 928 | 16689 | UAUGUCUUUACUGGUUACC | 928 | 16707 | GGUAACCAGUAAAGACAUA | 2579 |
| 16707 | CGUGUAACUAAAAAUAGUA | 929 | 16707 | CGUGUAACUAAAAAUAGUA | 929 | 16725 | UACUAUUUUUAGUUACACG | 2580 |
| 16725 | AAAGUACAGAUUGGAGAGU | 930 | 16725 | AAAGUACAGAUUGGAGAGU | 930 | 16743 | ACUCUCCAAUCUGUACUUU | 2581 |
| 16743 | UACACCUUUGAAAAAGGUG | 931 | 16743 | UACACCUUUGAAAAAGGUG | 931 | 16761 | CACCUUUUUCAAAGGUGUA | 2582 |
| 16761 | GACUAUGGUGAUGCUGUUG | 932 | 16761 | GACUAUGGUGAUGCUGUUG | 932 | 16779 | CAACAGCAUCACCAUAGUC | 2583 |
| 16779 | GUGUACAGAGGUACUACGA | 933 | 16779 | GUGUACAGAGGUACUACGA | 933 | 16797 | UCGUAGUACCUCUGUACAC | 2584 |
| 16797 | ACAUACAAGUUGAAUGUUG | 934 | 16797 | ACAUACAAGUUGAAUGUUG | 934 | 16815 | CAACAUUCAACUUGUAUGU | 2585 |
| 16815 | GGUGAUUACUUUGUGUUGA | 935 | 16815 | GGUGAUUACUUUGUGUUGA | 935 | 16833 | UCAACACAAAGUAAUCACC | 2586 |
| 16833 | ACAUCUCACACUGUAAUGC | 936 | 16833 | ACAUCUCACACUGUAAUGC | 936 | 16851 | GCAUUACAGUGUGAGAUGU | 2587 |
| 16851 | CCACUUAGUGCACCUACUC | 937 | 16851 | CCACUUAGUGCACCUACUC | 937 | 16869 | GAGUAGGUGCACUAAGUGG | 2588 |
| 16869 | CUAGUGCCACAAGAGCACU | 938 | 16869 | CUAGUGCCACAAGAGCACU | 938 | 16887 | AGUGCUCUUGUGGCACUAG | 2589 |
| 16887 | UAUGUGAGAAUUACUGGCU | 939 | 16887 | UAUGUGAGAAUUACUGGCU | 939 | 16905 | AGCCAGUAAUUCUCACAUA | 2590 |
| 16905 | UUGUACCCAACACUCAACA | 940 | 16905 | UUGUACCCAACACUCAACA | 940 | 16923 | UGUUGAGUGUUGGGUACAA | 2591 |
| 16923 | AUCUCAGAUGAGUUUUCUA | 941 | 16923 | AUCUCAGAUGAGUUUUCUA | 941 | 16941 | UAGAAAACUCAUCUGAGAU | 2592 |
| 16941 | AGCAAUGUUGCAAAUUAUC | 942 | 16941 | AGCAAUGUUGCAAAUUAUC | 942 | 16959 | GAUAAUUUGCAACAUUGCU | 2593 |
| 16959 | CAAAAGGUCGGCAUGCAAA | 943 | 16959 | CAAAAGGUCGGCAUGCAAA | 943 | 16977 | UUUGCAUGCCGACCUUUUG | 2594 |
| 16977 | AAGUACUCUACACUCCAAG | 944 | 16977 | AAGUACUCUACACUCCAAG | 944 | 16995 | CUUGGAGUGUAGAGUACUU | 2595 |
| 16995 | GGACCACCUGGUACUGGUA | 945 | 16995 | GGACCACCUGGUACUGGUA | 945 | 17013 | UACCAGUACCAGGUGGUCC | 2596 |
| 17013 | AAGAGUCAUUUUGCCAUCG | 946 | 17013 | AAGAGUCAUUUUGCCAUCG | 946 | 17031 | CGAUGGCAAAAUGACUCUU | 2597 |
| 17031 | GGACUUGCUCUCUAUUACC | 947 | 17031 | GGACUUGCUCUCUAUUACC | 947 | 17049 | GGUAAUAGAGAGCAAGUCC | 2598 |
| 17049 | CCAUCUGCUCGCAUAGUGU | 948 | 17049 | CCAUCUGCUCGCAUAGUGU | 948 | 17067 | ACACUAUGCGAGCAGAUGG | 2599 |
| 17067 | UAUACGGCAUGCUCUCAUG | 949 | 17067 | UAUACGGCAUGCUCUCAUG | 949 | 17085 | CAUGAGAGCAUGCCGUAUA | 2600 |
| 17085 | GCAGCUGUUGAUGCCCUAU | 950 | 17085 | GCAGCUGUUGAUGCCCUAU | 950 | 17103 | AUAGGGCAUCAACAGCUGC | 2601 |
| 17103 | UGUGAAAAGGCAUUAAAAU | 951 | 17103 | UGUGAAAAGGCAUUAAAAU | 951 | 17121 | AUUUUAAUGCCUUUUCACA | 2602 |
| 17121 | UAUUUGCCCAUAGAUAAAU | 952 | 17121 | UAUUUGCCCAUAGAUAAAU | 952 | 17139 | AUUUAUCUAUGGGCAAAUA | 2603 |
| 17139 | UGUAGUAGAAUCAUACCUG | 953 | 17139 | UGUAGUAGAAUCAUACCUG | 953 | 17157 | CAGGUAUGAUUCUACUACA | 2604 |
| 17157 | GCGCGUGCGCGCGUAGAGU | 954 | 17157 | GCGCGUGCGCGCGUAGAGU | 954 | 17175 | ACUCUACGCGCGCACGCGC | 2605 |
| 17175 | UGUUUUGAUAAAUUCAAAG | 955 | 17175 | UGUUUUGAUAAAUUCAAAG | 955 | 17193 | CUUUGAAUUUAUCAAAACA | 2606 |
| 17193 | GUGAAUUCAACACUAGAAC | 956 | 17193 | GUGAAUUCAACACUAGAAC | 956 | 17211 | GUUCUAGUGUUGAAUUCAC | 2607 |
| 17211 | CAGUAUGUUUUCUGCACUG | 957 | 17211 | CAGUAUGUUUUCUGCACUG | 957 | 17229 | CAGUGCAGAAAACAUACUG | 2608 |
| 17229 | GUAAAUGCAUUGCCAGAAA | 958 | 17229 | GUAAAUGCAUUGCCAGAAA | 958 | 17247 | UUUCUGGCAAUGCAUUUAC | 2609 |
| 17247 | ACAACUGCUGACAUUGUAG | 959 | 17247 | ACAACUGCUGACAUUGUAG | 959 | 17265 | CUACAAUGUCAGCAGUUGU | 2610 |
| 17265 | GUCUUUGAUGAAAUCUCUA | 960 | 17265 | GUCUUUGAUGAAAUCUCUA | 960 | 17283 | UAGAGAUUUCAUCAAAGAC | 2611 |
| 17283 | AUGGCUACUAAUUAUGACU | 961 | 17283 | AUGGCUACUAAUUAUGACU | 961 | 17301 | AGUCAUAAUUAGUAGCCAU | 2612 |
| 17301 | UUGAGUGUUGUCAAUGCUA | 962 | 17301 | UUGAGUGUUGUCAAUGCUA | 962 | 17319 | UAGCAUUGACAACACUCAA | 2613 |
| 17319 | AGACUUCGUGCAAAACACU | 963 | 17319 | AGACUUCGUGCAAAACACU | 963 | 17337 | AGUGUUUUGCACGAAGUCU | 2614 |
| 17337 | UACGUCUAUAUUGGCGAUC | 964 | 17337 | UACGUCUAUAUUGGCGAUC | 964 | 17355 | GAUCGCCAAUAUAGACGUA | 2615 |
| 17355 | CCUGCUCAAUUACCAGCCC | 965 | 17355 | CCUGCUCAAUUACCAGCCC | 965 | 17373 | GGGCUGGUAAUUGAGCAGG | 2616 |
| 17373 | CCCCGCACAUUGCUGACUA | 966 | 17373 | CCCCGCACAUUGCUGACUA | 966 | 17391 | UAGUCAGCAAUGUGCGGGG | 2617 |
| 17391 | AAAGGCACACUAGAACCAG | 967 | 17391 | AAAGGCACACUAGAACCAG | 967 | 17409 | CUGGUUCUAGUGUGCCUUU | 2618 |
| 17409 | GAAUAUUUUAAUUCAGUGU | 968 | 17409 | GAAUAUUUUAAUUCAGUGU | 968 | 17427 | ACACUGAAUUAAAAUAUUC | 2619 |
| 17427 | UGCAGACUUAUGAAAACAA | 969 | 17427 | UGCAGACUUAUGAAAACAA | 969 | 17445 | UUGUUUUCAUAAGUCUGCA | 2620 |
| 17445 | AUAGGUCCAGACAUGUUCC | 970 | 17445 | AUAGGUCCAGACAUGUUCC | 970 | 17463 | GGAACAUGUCUGGACCUAU | 2621 |
| 17463 | CUUGGAACUUGUCGCCGUU | 971 | 17463 | CUUGGAACUUGUCGCCGUU | 971 | 17481 | AACGGCGACAAGUUCCAAG | 2622 |
| 17481 | UGUCCUGCUGAAAUUGUUG | 972 | 17481 | UGUCCUGCUGAAAUUGUUG | 972 | 17499 | CAACAAUUUCAGCAGGACA | 2623 |
| 17499 | GACACUGUGAGUGCUUUAG | 973 | 17499 | GACACUGUGAGUGCUUUAG | 973 | 17517 | CUAAAGCACUCACAGUGUC | 2624 |
| 17517 | GUUUAUGACAAUAAGCUAA | 974 | 17517 | GUUUAUGACAAUAAGCUAA | 974 | 17535 | UUAGCUUAUUGUCAUAAAC | 2625 |
| 17535 | AAAGCACACAAGGAUAAGU | 975 | 17535 | AAAGCACACAAGGAUAAGU | 975 | 17553 | ACUUAUCCUUGUGUGCUUU | 2626 |
| 17553 | UCAGCUCAAUGCUUCAAAA | 976 | 17553 | UCAGCUCAAUGCUUCAAAA | 976 | 17571 | UUUUGAAGCAUUGAGCUGA | 2627 |
| 17571 | AUGUUCUACAAAGGUGUUA | 977 | 17571 | AUGUUCUACAAAGGUGUUA | 977 | 17589 | UAACACCUUUGUAGAACAU | 2628 |
| 17589 | AUUACACAUGAUGUUUCAU | 978 | 17589 | AUUACACAUGAUGUUUCAU | 978 | 17607 | AUGAAACAUCAUGUGUAAU | 2629 |
| 17607 | UCUGCAAUCAACAGACCUC | 979 | 17607 | UCUGCAAUCAACAGACCUC | 979 | 17625 | GAGGUCUGUUGAUUGCAGA | 2630 |
| 17625 | CAAAUAGGCGUUGUAAGAG | 980 | 17625 | CAAAUAGGCGUUGUAAGAG | 980 | 17643 | CUCUUACAACGCCUAUUUG | 2631 |
| 17643 | GAAUUUCUUACACGCAAUC | 981 | 17643 | GAAUUUCUUACACGCAAUC | 981 | 17661 | GAUUGCGUGUAAGAAAUUC | 2632 |
| 17661 | CCUGCUUGGAGAAAAGCUG | 982 | 17661 | CCUGCUUGGAGAAAAGCUG | 982 | 17679 | CAGCUUUUCUCCAAGCAGG | 2633 |
| 17679 | GUUUUUAUCUCACCUUAUA | 983 | 17679 | GUUUUUAUCUCACCUUAUA | 983 | 17697 | UAUAAGGUGAGAUAAAAAC | 2634 |
| 17697 | AAUUCACAGAACGCUGUAG | 984 | 17697 | AAUUCACAGAACGCUGUAG | 984 | 17715 | CUACAGCGUUCUGUGAAUU | 2635 |
| 17715 | GCUUCAAAAAUCUUAGGAU | 985 | 17715 | GCUUCAAAAAUCUUAGGAU | 985 | 17733 | AUCCUAAGAUUUUUGAAGC | 2636 |
| 17733 | UUGCCUACGCAGACUGUUG | 986 | 17733 | UUGCCUACGCAGACUGUUG | 986 | 17751 | CAACAGUCUGCGUAGGCAA | 2637 |
| 17751 | GAUUCAUCACAGGGUUCUG | 987 | 17751 | GAUUCAUCACAGGGUUCUG | 987 | 17769 | CAGAACCCUGUGAUGAAUC | 2638 |
| 17769 | GAAUAUGACUAUGUCAUAU | 988 | 17769 | GAAUAUGACUAUGUCAUAU | 988 | 17787 | AUAUGACAUAGUCAUAUUC | 2639 |
| 17787 | UUCACACAAACUACUGAAA | 989 | 17787 | UUCACACAAACUACUGAAA | 989 | 17805 | UUUCAGUAGUUUGUGUGAA | 2640 |
| 17805 | ACAGCACACUCUUGUAAUG | 990 | 17805 | ACAGCACACUCUUGUAAUG | 990 | 17823 | CAUUACAAGAGUGUGCUGU | 2641 |
| 17823 | GUCAACCGCUUCAAUGUGG | 991 | 17823 | GUCAACCGCUUCAAUGUGG | 991 | 17841 | CCACAUUGAAGCGGUUGAC | 2642 |
| 17841 | GCUAUCACAAGGGCAAAAA | 992 | 17841 | GCUAUCACAAGGGCAAAAA | 992 | 17859 | UUUUUGCCCUUGUGAUAGC | 2643 |
| 17859 | AUUGGCAUUUUGUGCAUAA | 993 | 17859 | AUUGGCAUUUUGUGCAUAA | 993 | 17877 | UUAUGCACAAAAUGCCAAU | 2644 |
| 17877 | AUGUCUGAUAGAGAUCUUU | 994 | 17877 | AUGUCUGAUAGAGAUCUUU | 994 | 17895 | AAAGAUCUCUAUCAGACAU | 2645 |
| 17895 | UAUGACAAACUGCAAUUUA | 995 | 17895 | UAUGACAAACUGCAAUUUA | 995 | 17913 | UAAAUUGCAGUUUGUCAUA | 2646 |
| 17913 | ACAAGUCUAGAAAUACCAC | 996 | 17913 | ACAAGUCUAGAAAUACCAC | 996 | 17931 | GUGGUAUUUCUAGACUUGU | 2647 |
| 17931 | CGUCGCAAUGUGGCUACAU | 997 | 17931 | CGUCGCAAUGUGGCUACAU | 997 | 17949 | AUGUAGCCACAUUGCGACG | 2648 |
| 17949 | UUACAAGCAGAAAAUGUAA | 998 | 17949 | UUACAAGCAGAAAAUGUAA | 998 | 17967 | UUACAUUUUCUGCUUGUAA | 2649 |
| 17967 | ACUGGACUUUUUAAGGACU | 999 | 17967 | ACUGGACUUUUUAAGGACU | 999 | 17985 | AGUCCUUAAAAAGUCCAGU | 2650 |
| 17985 | UGUAGUAAGAUCAUUACUG | 1000 | 17985 | UGUAGUAAGAUCAUUACUG | 1000 | 18003 | CAGUAAUGAUCUUACUACA | 2651 |
| 18003 | GGUCUUCAUCCUACACAGG | 1001 | 18003 | GGUCUUCAUCCUACACAGG | 1001 | 18021 | CCUGUGUAGGAUGAAGACC | 2652 |
| 18021 | GCACCUACACACCUCAGCG | 1002 | 18021 | GCACCUACACACCUCAGCG | 1002 | 18039 | CGCUGAGGUGUGUAGGUGC | 2653 |
| 18039 | GUUGAUAUAAAGUUCAAGA | 1003 | 18039 | GUUGAUAUAAAGUUCAAGA | 1003 | 18057 | UCUUGAACUUUAUAUCAAC | 2654 |
| 18057 | ACUGAAGGAUUAUGUGUUG | 1004 | 18057 | ACUGAAGGAUUAUGUGUUG | 1004 | 18075 | CAACACAUAAUCCUUCAGU | 2655 |
| 18075 | GACAUACCAGGCAUACCAA | 1005 | 18075 | GACAUACCAGGCAUACCAA | 1005 | 18093 | UUGGUAUGCCUGGUAUGUC | 2656 |
| 18093 | AAGGACAUGACCUACCGUA | 1006 | 18093 | AAGGACAUGACCUACCGUA | 1006 | 18111 | UACGGUAGGUCAUGUCCUU | 2657 |
| 18111 | AGACUCAUCUCUAUGAUGG | 1007 | 18111 | AGACUCAUCUCUAUGAUGG | 1007 | 18129 | CCAUCAUAGAGAUGAGUCU | 2658 |
| 18129 | GGUUUCAAAAUGAAUUACC | 1008 | 18129 | GGUUUCAAAAUGAAUUACC | 1008 | 18147 | GGUAAUUCAUUUUGAAACC | 2659 |
| 18147 | CAAGUCAAUGGUUACCCUA | 1009 | 18147 | CAAGUCAAUGGUUACCCUA | 1009 | 18165 | UAGGGUAACCAUUGACUUG | 2660 |
| 18165 | AAUAUGUUUAUCACCCGCG | 1010 | 18165 | AAUAUGUUUAUCACCCGCG | 1010 | 18183 | CGCGGGUGAUAAACAUAUU | 2661 |
| 18183 | GAAGAAGCUAUUCGUCACG | 1011 | 18183 | GAAGAAGCUAUUCGUCACG | 1011 | 18201 | CGUGACGAAUAGCUUCUUC | 2662 |
| 18201 | GUUCGUGCGUGGAUUGGCU | 1012 | 18201 | GUUCGUGCGUGGAUUGGCU | 1012 | 18219 | AGCCAAUCCACGCACGAAC | 2663 |
| 18219 | UUUGAUGUAGAGGGCUGUC | 1013 | 18219 | UUUGAUGUAGAGGGCUGUC | 1013 | 18237 | GACAGCCCUCUACAUCAAA | 2664 |
| 18237 | CAUGCAACUAGAGAUGCUG | 1014 | 18237 | CAUGCAACUAGAGAUGCUG | 1014 | 18255 | CAGCAUCUCUAGUUGCAUG | 2665 |
| 18255 | GUGGGUACUAACCUACCUC | 1015 | 18255 | GUGGGUACUAACCUACCUC | 1015 | 18273 | GAGGUAGGUUAGUACCCAC | 2666 |
| 18273 | CUCCAGCUAGGAUUUUCUA | 1016 | 18273 | CUCCAGCUAGGAUUUUCUA | 1016 | 18291 | UAGAAAAUCCUAGCUGGAG | 2667 |
| 18291 | ACAGGUGUUAACUUAGUAG | 1017 | 18291 | ACAGGUGUUAACUUAGUAG | 1017 | 18309 | CUACUAAGUUAACACCUGU | 2668 |
| 18309 | GCUGUACCGACUGGUUAUG | 1018 | 18309 | GCUGUACCGACUGGUUAUG | 1018 | 18327 | CAUAACCAGUCGGUACAGC | 2669 |
| 18327 | GUUGACACUGAAAAUAACA | 1019 | 18327 | GUUGACACUGAAAAUAACA | 1019 | 18345 | UGUUAUUUUCAGUGUCAAC | 2670 |
| 18345 | ACAGAAUUCACCAGAGUUA | 1020 | 18345 | ACAGAAUUCACCAGAGUUA | 1020 | 18363 | UAACUCUGGUGAAUUCUGU | 2671 |
| 18363 | AAUGCAAAACCUCCACCAG | 1021 | 18363 | AAUGCAAAACCUCCACCAG | 1021 | 18381 | CUGGUGGAGGUUUUGCAUU | 2672 |
| 18381 | GGUGACCAGUUUAAACAUC | 1022 | 18381 | GGUGACCAGUUUAAACAUC | 1022 | 18399 | GAUGUUUAAACUGGUCACC | 2673 |
| 18399 | CUUAUACCACUCAUGUAUA | 1023 | 18399 | CUUAUACCACUCAUGUAUA | 1023 | 18417 | UAUACAUGAGUGGUAUAAG | 2674 |
| 18417 | AAAGGCUUGCCCUGGAAUG | 1024 | 18417 | AAAGGCUUGCCCUGGAAUG | 1024 | 18435 | CAUUCCAGGGCAAGCCUUU | 2675 |
| 18435 | GUAGUGCGUAUUAAGAUAG | 1025 | 18435 | GUAGUGCGUAUUAAGAUAG | 1025 | 18453 | CUAUCUUAAUACGCACUAC | 2676 |
| 18453 | GUACAAAUGCUCAGUGAUA | 1026 | 18453 | GUACAAAUGCUCAGUGAUA | 1026 | 18471 | UAUCACUGAGCAUUUGUAC | 2677 |
| 18471 | ACACUGAAAGGAUUGUCAG | 1027 | 18471 | ACACUGAAAGGAUUGUCAG | 1027 | 18489 | CUGACAAUCCUUUCAGUGU | 2678 |
| 18489 | GACAGAGUCGUGUUCGUCC | 1028 | 18489 | GACAGAGUCGUGUUCGUCC | 1028 | 18507 | GGACGAACACGACUCUGUC | 2679 |
| 18507 | CUUUGGGCGCAUGGCUUUG | 1029 | 18507 | CUUUGGGCGCAUGGCUUUG | 1029 | 18525 | CAAAGCCAUGCGCCCAAAG | 2680 |
| 18525 | GAGCUUACAUCAAUGAAGU | 1030 | 18525 | GAGCUUACAUCAAUGAAGU | 1030 | 18543 | ACUUCAUUGAUGUAAGCUC | 2681 |
| 18543 | UACUUUGUCAAGAUUGGAC | 1031 | 18543 | UACUUUGUCAAGAUUGGAC | 1031 | 18561 | GUCCAAUCUUGACAAAGUA | 2682 |
| 18561 | CCUGAAAGAACGUGUUGUC | 1032 | 18561 | CCUGAAAGAACGUGUUGUC | 1032 | 18579 | GACAACACGUUCUUUCAGG | 2683 |
| 18579 | CUGUGUGACAAACGUGCAA | 1033 | 18579 | CUGUGUGACAAACGUGCAA | 1033 | 18597 | UUGCACGUUUGUCACACAG | 2684 |
| 18597 | ACUUGCUUUUCUACUUCAU | 1034 | 18597 | ACUUGCUUUUCUACUUCAU | 1034 | 18615 | AUGAAGUAGAAAAGCAAGU | 2685 |
| 18615 | UCAGAUACUUAUGCCUGCU | 1035 | 18615 | UCAGAUACUUAUGCCUGCU | 1035 | 18633 | AGCAGGCAUAAGUAUCUGA | 2686 |
| 18633 | UGGAAUCAUUCUGUGGGUU | 1036 | 18633 | UGGAAUCAUUCUGUGGGUU | 1036 | 18651 | AACCCACAGAAUGAUUCCA | 2687 |
| 18651 | UUUGACUAUGUCUAUAACC | 1037 | 18651 | UUUGACUAUGUCUAUAACC | 1037 | 18669 | GGUUAUAGACAUAGUCAAA | 2688 |
| 18669 | CCAUUUAUGAUUGAUGUUC | 1038 | 18669 | CCAUUUAUGAUUGAUGUUC | 1038 | 18687 | GAACAUCAAUCAUAAAUGG | 2689 |
| 18687 | CAGCAGUGGGGCUUUACGG | 1039 | 18687 | CAGCAGUGGGGCUUUACGG | 1039 | 18705 | CCGUAAAGCCCCACUGCUG | 2690 |
| 18705 | GGUAACCUUCAGAGUAACC | 1040 | 18705 | GGUAACCUUCAGAGUAACC | 1040 | 18723 | GGUUACUCUGAAGGUUACC | 2691 |
| 18723 | CAUGACCAACAUUGCCAGG | 1041 | 18723 | CAUGACCAACAUUGCCAGG | 1041 | 18741 | CCUGGCAAUGUUGGUCAUG | 2692 |
| 18741 | GUACAUGGAAAUGCACAUG | 1042 | 18741 | GUACAUGGAAAUGCACAUG | 1042 | 18759 | CAUGUGCAUUUCCAUGUAC | 2693 |
| 18759 | GUGGCUAGUUGUGAUGCUA | 1043 | 18759 | GUGGCUAGUUGUGAUGCUA | 1043 | 18777 | UAGCAUCACAACUAGCCAC | 2694 |
| 18777 | AUCAUGACUAGAUGUUUAG | 1044 | 18777 | AUCAUGACUAGAUGUUUAG | 1044 | 18795 | CUAAACAUCUAGUCAUGAU | 2695 |
| 18795 | GCAGUCCAUGAGUGCUUUG | 1045 | 18795 | GCAGUCCAUGAGUGCUUUG | 1045 | 18813 | CAAAGCACUCAUGGACUGC | 2696 |
| 18813 | GUUAAGCGCGUUGAUUGGU | 1046 | 18813 | GUUAAGCGCGUUGAUUGGU | 1046 | 18831 | ACCAAUCAACGCGCUUAAC | 2697 |
| 18831 | UCUGUUGAAUACCCUAUUA | 1047 | 18831 | UCUGUUGAAUACCCUAUUA | 1047 | 18849 | UAAUAGGGUAUUCAACAGA | 2698 |
| 18849 | AUAGGAGAUGAACUGAGGG | 1048 | 18849 | AUAGGAGAUGAACUGAGGG | 1048 | 18867 | CCCUCAGUUCAUCUCCUAU | 2699 |
| 18867 | GUUAAUUCUGCUUGCAGAA | 1049 | 18867 | GUUAAUUCUGCUUGCAGAA | 1049 | 18885 | UUCUGCAAGCAGAAUUAAC | 2700 |
| 18885 | AAAGUACAACACAUGGUUG | 1050 | 18885 | AAAGUACAACACAUGGUUG | 1050 | 18903 | CAACCAUGUGUUGUACUUU | 2701 |
| 18903 | GUGAAGUCUGCAUUGCUUG | 1051 | 18903 | GUGAAGUCUGCAUUGCUUG | 1051 | 18921 | CAAGCAAUGCAGACUUCAC | 2702 |
| 18921 | GCUGAUAAGUUUCCAGUUC | 1052 | 18921 | GCUGAUAAGUUUCCAGUUC | 1052 | 18939 | GAACUGGAAACUUAUCAGC | 2703 |
| 18939 | CUUCAUGACAUUGGAAAUC | 1053 | 18939 | CUUCAUGACAUUGGAAAUC | 1053 | 18957 | GAUUUCCAAUGUCAUGAAG | 2704 |
| 18957 | CCAAAGGCUAUCAAGUGUG | 1054 | 18957 | CCAAAGGCUAUCAAGUGUG | 1054 | 18975 | CACACUUGAUAGCCUUUGG | 2705 |
| 18975 | GUGCCUCAGGCUGAAGUAG | 1055 | 18975 | GUGCCUCAGGCUGAAGUAG | 1055 | 18993 | CUACUUCAGCCUGAGGCAC | 2706 |
| 18993 | GAAUGGAAGUUCUACGAUG | 1056 | 18993 | GAAUGGAAGUUCUACGAUG | 1056 | 19011 | CAUCGUAGAACUUCCAUUC | 2707 |
| 19011 | GCUCAGCCAUGUAGUGACA | 1057 | 19011 | GCUCAGCCAUGUAGUGACA | 1057 | 19029 | UGUCACUACAUGGCUGAGC | 2708 |
| 19029 | AAAGCUUACAAAAUAGAGG | 1058 | 19029 | AAAGCUUACAAAAUAGAGG | 1058 | 19047 | CCUCUAUUUUGUAAGCUUU | 2709 |
| 19047 | GAACUCUUCUAUUCUUAUG | 1059 | 19047 | GAACUCUUCUAUUCUUAUG | 1059 | 19065 | CAUAAGAAUAGAAGAGUUC | 2710 |
| 19065 | GCUACACAUCACGAUAAAU | 1060 | 19065 | GCUACACAUCACGAUAAAU | 1060 | 19083 | AUUUAUCGUGAUGUGUAGC | 2711 |
| 19083 | UUCACUGAUGGUGUUUGUU | 1061 | 19083 | UUCACUGAUGGUGUUUGUU | 1061 | 19101 | AACAAACACCAUCAGUGAA | 2712 |
| 19101 | UUGUUUUGGAAUUGUAACG | 1062 | 19101 | UUGUUUUGGAAUUGUAACG | 1062 | 19119 | CGUUACAAUUCCAAAACAA | 2713 |
| 19119 | GUUGAUCGUUACCCAGCCA | 1063 | 19119 | GUUGAUCGUUACCCAGCCA | 1063 | 19137 | UGGCUGGGUAACGAUCAAC | 2714 |
| 19137 | AAUGCAAUUGUGUGUAGGU | 1064 | 19137 | AAUGCAAUUGUGUGUAGGU | 1064 | 19155 | ACCUACACACAAUUGCAUU | 2715 |
| 19155 | UUUGACACAAGAGUCUUGU | 1065 | 19155 | UUUGACACAAGAGUCUUGU | 1065 | 19173 | ACAAGACUCUUGUGUCAAA | 2716 |
| 19173 | UCAAACUUGAACUUACCAG | 1066 | 19173 | UCAAACUUGAACUUACCAG | 1066 | 19191 | CUGGUAAGUUCAAGUUUGA | 2717 |
| 19191 | GGCUGUGAUGGUGGUAGUU | 1067 | 19191 | GGCUGUGAUGGUGGUAGUU | 1067 | 19209 | AACUACCACCAUCACAGCC | 2718 |
| 19209 | UUGUAUGUGAAUAAGCAUG | 1068 | 19209 | UUGUAUGUGAAUAAGCAUG | 1068 | 19227 | CAUGCUUAUUCACAUACAA | 2719 |
| 19227 | GCAUUCCACACUCCAGCUU | 1069 | 19227 | GCAUUCCACACUCCAGCUU | 1069 | 19245 | AAGCUGGAGUGUGGAAUGC | 2720 |
| 19245 | UUCGAUAAAAGUGCAUUUA | 1070 | 19245 | UUCGAUAAAAGUGCAUUUA | 1070 | 19263 | UAAAUGCACUUUUAUCGAA | 2721 |
| 19263 | ACUAAUUUAAAGCAAUUGC | 1071 | 19263 | ACUAAUUUAAAGCAAUUGC | 1071 | 19281 | GCAAUUGCUUUAAAUUAGU | 2722 |
| 19281 | CCUUUCUUUUACUAUUCUG | 1072 | 19281 | CCUUUCUUUUACUAUUCUG | 1072 | 19299 | CAGAAUAGUAAAAGAAAGG | 2723 |
| 19299 | GAUAGUCCUUGUGAGUCUC | 1073 | 19299 | GAUAGUCCUUGUGAGUCUC | 1073 | 19317 | GAGACUCACAAGGACUAUC | 2724 |
| 19317 | CAUGGCAAACAAGUAGUGU | 1074 | 19317 | CAUGGCAAACAAGUAGUGU | 1074 | 19335 | ACACUACUUGUUUGCCAUG | 2725 |
| 19335 | UCGGAUAUUGAUUAUGUUC | 1075 | 19335 | UCGGAUAUUGAUUAUGUUC | 1075 | 19353 | GAACAUAAUCAAUAUCCGA | 2726 |
| 19353 | CCACUCAAAUCUGCUACGU | 1076 | 19353 | CCACUCAAAUCUGCUACGU | 1076 | 19371 | ACGUAGCAGAUUUGAGUGG | 2727 |
| 19371 | UGUAUUACACGAUGCAAUU | 1077 | 19371 | UGUAUUACACGAUGCAAUU | 1077 | 19389 | AAUUGCAUCGUGUAAUACA | 2728 |
| 19389 | UUAGGUGGUGCUGUUUGCA | 1078 | 19389 | UUAGGUGGUGCUGUUUGCA | 1078 | 19407 | UGCAAACAGCACCACCUAA | 2729 |
| 19407 | AGACACCAUGCAAAUGAGU | 1079 | 19407 | AGACACCAUGCAAAUGAGU | 1079 | 19425 | ACUCAUUUGCAUGGUGUCU | 2730 |
| 19425 | UACCGACAGUACUUGGAUG | 1080 | 19425 | UACCGACAGUACUUGGAUG | 1080 | 19443 | CAUCCAAGUACUGUCGGUA | 2731 |
| 19443 | GCAUAUAAUAUGAUGAUUU | 1081 | 19443 | GCAUAUAAUAUGAUGAUUU | 1081 | 19461 | AAAUCAUCAUAUUAUAUGC | 2732 |
| 19461 | UCUGCUGGAUUUAGCCUAU | 1082 | 19461 | UCUGCUGGAUUUAGCCUAU | 1082 | 19479 | AUAGGCUAAAUCCAGCAGA | 2733 |
| 19479 | UGGAUUUACAAACAAUUUG | 1083 | 19479 | UGGAUUUACAAACAAUUUG | 1083 | 19497 | CAAAUUGUUUGUAAAUCCA | 2734 |
| 19497 | GAUACUUAUAACCUGUGGA | 1084 | 19497 | GAUACUUAUAACCUGUGGA | 1084 | 19515 | UCCACAGGUUAUAAGUAUC | 2735 |
| 19515 | AAUACAUUUACCAGGUUAC | 1085 | 19515 | AAUACAUUUACCAGGUUAC | 1085 | 19533 | GUAACCUGGUAAAUGUAUU | 2736 |
| 19533 | CAGAGUUUAGAAAAUGUGG | 1086 | 19533 | CAGAGUUUAGAAAAUGUGG | 1086 | 19551 | CCACAUUUUCUAAACUCUG | 2737 |
| 19551 | GCUUAUAAUGUUGUUAAUA | 1087 | 19551 | GCUUAUAAUGUUGUUAAUA | 1087 | 19569 | UAUUAACAACAUUAUAAGC | 2738 |
| 19569 | AAAGGACACUUUGAUGGAC | 1088 | 19569 | AAAGGACACUUUGAUGGAC | 1088 | 19587 | GUCCAUCAAAGUGUCCUUU | 2739 |
| 19587 | CACGCCGGCGAAGCACCUG | 1089 | 19587 | CACGCCGGCGAAGCACCUG | 1089 | 19605 | CAGGUGCUUCGCCGGCGUG | 2740 |
| 19605 | GUUUCCAUCAUUAAUAAUG | 1090 | 19605 | GUUUCCAUCAUUAAUAAUG | 1090 | 19623 | CAUUAUUAAUGAUGGAAAC | 2741 |
| 19623 | GCUGUUUACACAAAGGUAG | 1091 | 19623 | GCUGUUUACACAAAGGUAG | 1091 | 19641 | CUACCUUUGUGUAAACAGC | 2742 |
| 19641 | GAUGGUAUUGAUGUGGAGA | 1092 | 19641 | GAUGGUAUUGAUGUGGAGA | 1092 | 19659 | UCUCCACAUCAAUACCAUC | 2743 |
| 19659 | AUCUUUGAAAAUAAGACAA | 1093 | 19659 | AUCUUUGAAAAUAAGACAA | 1093 | 19677 | UUGUCUUAUUUUCAAAGAU | 2744 |
| 19677 | ACACUUCCUGUUAAUGUUG | 1094 | 19677 | ACACUUCCUGUUAAUGUUG | 1094 | 19695 | CAACAUUAACAGGAAGUGU | 2745 |
| 19695 | GCAUUUGAGCUUUGGGCUA | 1095 | 19695 | GCAUUUGAGCUUUGGGCUA | 1095 | 19713 | UAGCCCAAAGCUCAAAUGC | 2746 |
| 19713 | AAGCGUAACAUUAAACCAG | 1096 | 19713 | AAGCGUAACAUUAAACCAG | 1096 | 19731 | CUGGUUUAAUGUUACGCUU | 2747 |
| 19731 | GUGCCAGAGAUUAAGAUAC | 1097 | 19731 | GUGCCAGAGAUUAAGAUAC | 1097 | 19749 | GUAUCUUAAUCUCUGGCAC | 2748 |
| 19749 | CUCAAUAAUUUGGGUGUUG | 1098 | 19749 | CUCAAUAAUUUGGGUGUUG | 1098 | 19767 | CAACACCCAAAUUAUUGAG | 2749 |
| 19767 | GAUAUCGCUGCUAAUACUG | 1099 | 19767 | GAUAUCGCUGCUAAUACUG | 1099 | 19785 | CAGUAUUAGCAGCGAUAUC | 2750 |
| 19785 | GUAAUCUGGGACUACAAAA | 1100 | 19785 | GUAAUCUGGGACUACAAAA | 1100 | 19803 | UUUUGUAGUCCCAGAUUAC | 2751 |
| 19803 | AGAGAAGCCCCAGCACAUG | 1101 | 19803 | AGAGAAGCCCCAGCACAUG | 1101 | 19821 | CAUGUGCUGGGGCUUCUCU | 2752 |
| 19821 | GUAUCUACAAUAGGUGUCU | 1102 | 19821 | GUAUCUACAAUAGGUGUCU | 1102 | 19839 | AGACACCUAUUGUAGAUAC | 2753 |
| 19839 | UGCACAAUGACUGACAUUG | 1103 | 19839 | UGCACAAUGACUGACAUUG | 1103 | 19857 | CAAUGUCAGUCAUUGUGCA | 2754 |
| 19857 | GCCAAGAAACCUACUGAGA | 1104 | 19857 | GCCAAGAAACCUACUGAGA | 1104 | 19875 | UCUCAGUAGGUUUCUUGGC | 2755 |
| 19875 | AGUGCUUGUUCUUCACUUA | 1105 | 19875 | AGUGCUUGUUCUUCACUUA | 1105 | 19893 | UAAGUGAAGAACAAGCACU | 2756 |
| 19893 | ACUGUCUUGUUUGAUGGUA | 1106 | 19893 | ACUGUCUUGUUUGAUGGUA | 1106 | 19911 | UACCAUCAAACAAGACAGU | 2757 |
| 19911 | AGAGUGGAAGGACAGGUAG | 1107 | 19911 | AGAGUGGAAGGACAGGUAG | 1107 | 19929 | CUACCUGUCCUUCCACUCU | 2758 |
| 19929 | GACCUUUUUAGAAACGCCC | 1108 | 19929 | GACCUUUUUAGAAACGCCC | 1108 | 19947 | GGGCGUUUCUAAAAAGGUC | 2759 |
| 19947 | CGUAAUGGUGUUUUAAUAA | 1109 | 19947 | CGUAAUGGUGUUUUAAUAA | 1109 | 19965 | UUAUUAAAACACCAUUACG | 2760 |
| 19965 | ACAGAAGGUUCAGUCAAAG | 1110 | 19965 | ACAGAAGGUUCAGUCAAAG | 1110 | 19983 | CUUUGACUGAACCUUCUGU | 2761 |
| 19983 | GGUCUAACACCUUCAAAGG | 1111 | 19983 | GGUCUAACACCUUCAAAGG | 1111 | 20001 | CCUUUGAAGGUGUUAGACC | 2762 |
| 20001 | GGACCAGCACAAGCUAGCG | 1112 | 20001 | GGACCAGCACAAGCUAGCG | 1112 | 20019 | CGCUAGCUUGUGCUGGUCC | 2763 |
| 20019 | GUCAAUGGAGUCACAUUAA | 1113 | 20019 | GUCAAUGGAGUCACAUUAA | 1113 | 20037 | UUAAUGUGACUCCAUUGAC | 2764 |
| 20037 | AUUGGAGAAUCAGUAAAAA | 1114 | 20037 | AUUGGAGAAUCAGUAAAAA | 1114 | 20055 | UUUUUACUGAUUCUCCAAU | 2765 |
| 20055 | ACACAGUUUAACUACUUUA | 1115 | 20055 | ACACAGUUUAACUACUUUA | 1115 | 20073 | UAAAGUAGUUAAACUGUGU | 2766 |
| 20073 | AAGAAAGUAGACGGCAUUA | 1116 | 20073 | AAGAAAGUAGACGGCAUUA | 1116 | 20091 | UAAUGCCGUCUACUUUCUU | 2767 |
| 20091 | AUUCAACAGUUGCCUGAAA | 1117 | 20091 | AUUCAACAGUUGCCUGAAA | 1117 | 20109 | UUUCAGGCAACUGUUGAAU | 2768 |
| 20109 | ACCUACUUUACUCAGAGCA | 1118 | 20109 | ACCUACUUUACUCAGAGCA | 1118 | 20127 | UGCUCUGAGUAAAGUAGGU | 2769 |
| 20127 | AGAGACUUAGAGGAUUUUA | 1119 | 20127 | AGAGACUUAGAGGAUUUUA | 1119 | 20145 | UAAAAUCCUCUAAGUCUCU | 2770 |
| 20145 | AAGCCCAGAUCACAAAUGG | 1120 | 20145 | AAGCCCAGAUCACAAAUGG | 1120 | 20163 | CCAUUUGUGAUCUGGGCUU | 2771 |
| 20163 | GAAACUGACUUUCUCGAGC | 1121 | 20163 | GAAACUGACUUUCUCGAGC | 1121 | 20181 | GCUCGAGAAAGUCAGUUUC | 2772 |
| 20181 | CUCGCUAUGGAUGAAUUCA | 1122 | 20181 | CUCGCUAUGGAUGAAUUCA | 1122 | 20199 | UGAAUUCAUCCAUAGCGAG | 2773 |
| 20199 | AUACAGCGAUAUAAGCUCG | 1123 | 20199 | AUACAGCGAUAUAAGCUCG | 1123 | 20217 | CGAGCUUAUAUCGCUGUAU | 2774 |
| 20217 | GAGGGCUAUGCCUUCGAAC | 1124 | 20217 | GAGGGCUAUGCCUUCGAAC | 1124 | 20235 | GUUCGAAGGCAUAGCCCUC | 2775 |
| 20235 | CACAUCGUUUAUGGAGAUU | 1125 | 20235 | CACAUCGUUUAUGGAGAUU | 1125 | 20253 | AAUCUCCAUAAACGAUGUG | 2776 |
| 20253 | UUCAGUCAUGGACAACUUG | 1126 | 20253 | UUCAGUCAUGGACAACUUG | 1126 | 20271 | CAAGUUGUCCAUGACUGAA | 2777 |
| 20271 | GGCGGUCUUCAUUUAAUGA | 1127 | 20271 | GGCGGUCUUCAUUUAAUGA | 1127 | 20289 | UCAUUAAAUGAAGACCGCC | 2778 |
| 20289 | AUAGGCUUAGCCAAGCGCU | 1128 | 20289 | AUAGGCUUAGCCAAGCGCU | 1128 | 20307 | AGCGCUUGGCUAAGCCUAU | 2779 |
| 20307 | UCACAAGAUUCACCACUUA | 1129 | 20307 | UCACAAGAUUCACCACUUA | 1129 | 20325 | UAAGUGGUGAAUCUUGUGA | 2780 |
| 20325 | AAAUUAGAGGAUUUUAUCC | 1130 | 20325 | AAAUUAGAGGAUUUUAUCC | 1130 | 20343 | GGAUAAAAUCCUCUAAUUU | 2781 |
| 20343 | CCUAUGGACAGCACAGUGA | 1131 | 20343 | CCUAUGGACAGCACAGUGA | 1131 | 20361 | UCACUGUGCUGUCCAUAGG | 2782 |
| 20361 | AAAAAUUACUUCAUAACAG | 1132 | 20361 | AAAAAUUACUUCAUAACAG | 1132 | 20379 | CUGUUAUGAAGUAAUUUUU | 2783 |
| 20379 | GAUGCGCAAACAGGUUCAU | 1133 | 20379 | GAUGCGCAAACAGGUUCAU | 1133 | 20397 | AUGAACCUGUUUGCGCAUC | 2784 |
| 20397 | UCAAAAUGUGUGUGUUCUG | 1134 | 20397 | UCAAAAUGUGUGUGUUCUG | 1134 | 20415 | CAGAACACACACAUUUUGA | 2785 |
| 20415 | GUGAUUGAUCUUUUACUUG | 1135 | 20415 | GUGAUUGAUCUUUUACUUG | 1135 | 20433 | CAAGUAAAAGAUCAAUCAC | 2786 |
| 20433 | GAUGACUUUGUCGAGAUAA | 1136 | 20433 | GAUGACUUUGUCGAGAUAA | 1136 | 20451 | UUAUCUCGACAAAGUCAUC | 2787 |
| 20451 | AUAAAGUCACAAGAUUUGU | 1137 | 20451 | AUAAAGUCACAAGAUUUGU | 1137 | 20469 | ACAAAUCUUGUGACUUUAU | 2788 |
| 20469 | UCAGUGAUUUCAAAAGUGG | 1138 | 20469 | UCAGUGAUUUCAAAAGUGG | 1138 | 20487 | CCACUUUUGAAAUCACUGA | 2789 |
| 20487 | GUCAAGGUUACAAUUGACU | 1139 | 20487 | GUCAAGGUUACAAUUGACU | 1139 | 20505 | AGUCAAUUGUAACCUUGAC | 2790 |
| 20505 | UAUGCUGAAAUUUCAUUCA | 1140 | 20505 | UAUGCUGAAAUUUCAUUCA | 1140 | 20523 | UGAAUGAAAUUUCAGCAUA | 2791 |
| 20523 | AUGCUUUGGUGUAAGGAUG | 1141 | 20523 | AUGCUUUGGUGUAAGGAUG | 1141 | 20541 | CAUCCUUACACCAAAGCAU | 2792 |
| 20541 | GGACAUGUUGAAACCUUCU | 1142 | 20541 | GGACAUGUUGAAACCUUCU | 1142 | 20559 | AGAAGGUUUCAACAUGUCC | 2793 |
| 20559 | UACCCAAAACUACAAGCAA | 1143 | 20559 | UACCCAAAACUACAAGCAA | 1143 | 20577 | UUGCUUGUAGUUUUGGGUA | 2794 |
| 20577 | AGUCGAGCGUGGCAACCAG | 1144 | 20577 | AGUCGAGCGUGGCAACCAG | 1144 | 20595 | CUGGUUGCCACGCUCGACU | 2795 |
| 20595 | GGUGUUGCGAUGCCUAACU | 1145 | 20595 | GGUGUUGCGAUGCCUAACU | 1145 | 20613 | AGUUAGGCAUCGCAACACC | 2796 |
| 20613 | UUGUACAAGAUGCAAAGAA | 1146 | 20613 | UUGUACAAGAUGCAAAGAA | 1146 | 20631 | UUCUUUGCAUCUUGUACAA | 2797 |
| 20631 | AUGCUUCUUGAAAAGUGUG | 1147 | 20631 | AUGCUUCUUGAAAAGUGUG | 1147 | 20649 | CACACUUUUCAAGAAGCAU | 2798 |
| 20649 | GACCUUCAGAAUUAUGGUG | 1148 | 20649 | GACCUUCAGAAUUAUGGUG | 1148 | 20667 | CACCAUAAUUCUGAAGGUC | 2799 |
| 20667 | GAAAAUGCUGUUAUACCAA | 1149 | 20667 | GAAAAUGCUGUUAUACCAA | 1149 | 20685 | UUGGUAUAACAGCAUUUUC | 2800 |
| 20685 | AAAGGAAUAAUGAUGAAUG | 1150 | 20685 | AAAGGAAUAAUGAUGAAUG | 1150 | 20703 | CAUUCAUCAUUAUUCCUUU | 2801 |
| 20703 | GUCGCAAAGUAUACUCAAC | 1151 | 20703 | GUCGCAAAGUAUACUCAAC | 1151 | 20721 | GUUGAGUAUACUUUGCGAC | 2802 |
| 20721 | CUGUGUCAAUACUUAAAUA | 1152 | 20721 | CUGUGUCAAUACUUAAAUA | 1152 | 20739 | UAUUUAAGUAUUGACACAG | 2803 |
| 20739 | ACACUUACUUUAGCUGUAC | 1153 | 20739 | ACACUUACUUUAGCUGUAC | 1153 | 20757 | GUACAGCUAAAGUAAGUGU | 2804 |
| 20757 | CCCUACAACAUGAGAGUUA | 1154 | 20757 | CCCUACAACAUGAGAGUUA | 1154 | 20775 | UAACUCUCAUGUUGUAGGG | 2805 |
| 20775 | AUUCACUUUGGUGCUGGCU | 1155 | 20775 | AUUCACUUUGGUGCUGGCU | 1155 | 20793 | AGCCAGCACCAAAGUGAAU | 2806 |
| 20793 | UCUGAUAAAGGAGUUGCAC | 1156 | 20793 | UCUGAUAAAGGAGUUGCAC | 1156 | 20811 | GUGCAACUCCUUUAUCAGA | 2807 |
| 20811 | CCAGGUACAGCUGUGCUCA | 1157 | 20811 | CCAGGUACAGCUGUGCUCA | 1157 | 20829 | UGAGCACAGCUGUACCUGG | 2808 |
| 20829 | AGACAAUGGUUGCCAACUG | 1158 | 20829 | AGACAAUGGUUGCCAACUG | 1158 | 20847 | CAGUUGGCAACCAUUGUCU | 2809 |
| 20847 | GGCACACUACUUGUCGAUU | 1159 | 20847 | GGCACACUACUUGUCGAUU | 1159 | 20865 | AAUCGACAAGUAGUGUGCC | 2810 |
| 20865 | UCAGAUCUUAAUGACUUCG | 1160 | 20865 | UCAGAUCUUAAUGACUUCG | 1160 | 20883 | CGAAGUCAUUAAGAUCUGA | 2811 |
| 20883 | GUCUCCGACGCAUAUUCUA | 1161 | 20883 | GUCUCCGACGCAUAUUCUA | 1161 | 20901 | UAGAAUAUGCGUCGGAGAC | 2812 |
| 20901 | ACUUUAAUUGGAGACUGUG | 1162 | 20901 | ACUUUAAUUGGAGACUGUG | 1162 | 20919 | CACAGUCUCCAAUUAAAGU | 2813 |
| 20919 | GCAACAGUACAUACGGCUA | 1163 | 20919 | GCAACAGUACAUACGGCUA | 1163 | 20937 | UAGCCGUAUGUACUGUUGC | 2814 |
| 20937 | AAUAAAUGGGACCUUAUUA | 1164 | 20937 | AAUAAAUGGGACCUUAUUA | 1164 | 20955 | UAAUAAGGUCCCAUUUAUU | 2815 |
| 20955 | AUUAGCGAUAUGUAUGACC | 1165 | 20955 | AUUAGCGAUAUGUAUGACC | 1165 | 20973 | GGUCAUACAUAUCGCUAAU | 2816 |
| 20973 | CCUAGGACCAAACAUGUGA | 1166 | 20973 | CCUAGGACCAAACAUGUGA | 1166 | 20991 | UCACAUGUUUGGUCCUAGG | 2817 |
| 20991 | ACAAAAGAGAAUGACUCUA | 1167 | 20991 | ACAAAAGAGAAUGACUCUA | 1167 | 21009 | UAGAGUCAUUCUCUUUUGU | 2818 |
| 21009 | AAAGAAGGGUUUUUCACUU | 1168 | 21009 | AAAGAAGGGUUUUUCACUU | 1168 | 21027 | AAGUGAAAAACCCUUCUUU | 2819 |
| 21027 | UAUCUGUGUGGAUUUAUAA | 1169 | 21027 | UAUCUGUGUGGAUUUAUAA | 1169 | 21045 | UUAUAAAUCCACACAGAUA | 2820 |
| 21045 | AAGCAAAAACUAGCCCUGG | 1170 | 21045 | AAGCAAAAACUAGCCCUGG | 1170 | 21063 | CCAGGGCUAGUUUUUGCUU | 2821 |
| 21063 | GGUGGUUCUAUAGCUGUAA | 1171 | 21063 | GGUGGUUCUAUAGCUGUAA | 1171 | 21081 | UUACAGCUAUAGAACCACC | 2822 |
| 21081 | AAGAUAACAGAGCAUUCUU | 1172 | 21081 | AAGAUAACAGAGCAUUCUU | 1172 | 21099 | AAGAAUGCUCUGUUAUCUU | 2823 |
| 21099 | UGGAAUGCUGACCUUUACA | 1173 | 21099 | UGGAAUGCUGACCUUUACA | 1173 | 21117 | UGUAAAGGUCAGCAUUCCA | 2824 |
| 21117 | AAGCUUAUGGGCCAUUUCU | 1174 | 21117 | AAGCUUAUGGGCCAUUUCU | 1174 | 21135 | AGAAAUGGCCCAUAAGCUU | 2825 |
| 21135 | UCAUGGUGGACAGCUUUUG | 1175 | 21135 | UCAUGGUGGACAGCUUUUG | 1175 | 21153 | CAAAAGCUGUCCACCAUGA | 2826 |
| 21153 | GUUACAAAUGUAAAUGCAU | 1176 | 21153 | GUUACAAAUGUAAAUGCAU | 1176 | 21171 | AUGCAUUUACAUUUGUAAC | 2827 |
| 21171 | UCAUCAUCGGAAGCAUUUU | 1177 | 21171 | UCAUCAUCGGAAGCAUUUU | 1177 | 21189 | AAAAUGCUUCCGAUGAUGA | 2828 |
| 21189 | UUAAUUGGGGCUAACUAUC | 1178 | 21189 | UUAAUUGGGGCUAACUAUC | 1178 | 21207 | GAUAGUUAGCCCCAAUUAA | 2829 |
| 21207 | CUUGGCAAGCCGAAGGAAC | 1179 | 21207 | CUUGGCAAGCCGAAGGAAC | 1179 | 21225 | GUUCCUUCGGCUUGCCAAG | 2830 |
| 21225 | CAAAUUGAUGGCUAUACCA | 1180 | 21225 | CAAAUUGAUGGCUAUACCA | 1180 | 21243 | UGGUAUAGCCAUCAAUUUG | 2831 |
| 21243 | AUGCAUGCUAACUACAUUU | 1181 | 21243 | AUGCAUGCUAACUACAUUU | 1181 | 21261 | AAAUGUAGUUAGCAUGCAU | 2832 |
| 21261 | UUCUGGAGGAACACAAAUC | 1182 | 21261 | UUCUGGAGGAACACAAAUC | 1182 | 21279 | GAUUUGUGUUCCUCCAGAA | 2833 |
| 21279 | CCUAUCCAGUUGUCUUCCU | 1183 | 21279 | CCUAUCCAGUUGUCUUCCU | 1183 | 21297 | AGGAAGACAACUGGAUAGG | 2834 |
| 21297 | UAUUCACUCUUUGACAUGA | 1184 | 21297 | UAUUCACUCUUUGACAUGA | 1184 | 21315 | UCAUGUCAAAGAGUGAAUA | 2835 |
| 21315 | AGCAAAUUUCCUCUUAAAU | 1185 | 21315 | AGCAAAUUUCCUCUUAAAU | 1185 | 21333 | AUUUAAGAGGAAAUUUGCU | 2836 |
| 21333 | UUAAGAGGAACUGCUGUAA | 1186 | 21333 | UUAAGAGGAACUGCUGUAA | 1186 | 21351 | UUACAGCAGUUCCUCUUAA | 2837 |
| 21351 | AUGUCUCUUAAGGAGAAUC | 1187 | 21351 | AUGUCUCUUAAGGAGAAUC | 1187 | 21369 | GAUUCUCCUUAAGAGACAU | 2838 |
| 21369 | CAAAUCAAUGAUAUGAUUU | 1188 | 21369 | CAAAUCAAUGAUAUGAUUU | 1188 | 21387 | AAAUCAUAUCAUUGAUUUG | 2839 |
| 21387 | UAUUCUCUUCUGGAAAAAG | 1189 | 21387 | UAUUCUCUUCUGGAAAAAG | 1189 | 21405 | CUUUUUCCAGAAGAGAAUA | 2840 |
| 21405 | GGUAGGCUUAUCAUUAGAG | 1190 | 21405 | GGUAGGCUUAUCAUUAGAG | 1190 | 21423 | CUCUAAUGAUAAGCCUACC | 2841 |
| 21423 | GAAAACAACAGAGUUGUGG | 1191 | 21423 | GAAAACAACAGAGUUGUGG | 1191 | 21441 | CCACAACUCUGUUGUUUUC | 2842 |
| 21441 | GUUUCAAGUGAUAUUCUUG | 1192 | 21441 | GUUUCAAGUGAUAUUCUUG | 1192 | 21459 | CAAGAAUAUCACUUGAAAC | 2843 |
| 21459 | GUUAACAACUAAACGAACA | 1193 | 21459 | GUUAACAACUAAACGAACA | 1193 | 21477 | UGUUCGUUUAGUUGUUAAC | 2844 |
| 21477 | AUGUUUAUUUUCUUAUUAU | 1194 | 21477 | AUGUUUAUUUUCUUAUUAU | 1194 | 21495 | AUAAUAAGAAAAUAAACAU | 2845 |
| 21495 | UUUCUUACUCUCACUAGUG | 1195 | 21495 | UUUCUUACUCUCACUAGUG | 1195 | 21513 | CACUAGUGAGAGUAAGAAA | 2846 |
| 21513 | GGUAGUGACCUUGACCGGU | 1196 | 21513 | GGUAGUGACCUUGACCGGU | 1196 | 21531 | ACCGGUCAAGGUCACUACC | 2847 |
| 21531 | UGCACCACUUUUGAUGAUG | 1197 | 21531 | UGCACCACUUUUGAUGAUG | 1197 | 21549 | CAUCAUCAAAAGUGGUGCA | 2848 |
| 21549 | GUUCAAGCUCCUAAUUACA | 1198 | 21549 | GUUCAAGCUCCUAAUUACA | 1198 | 21567 | UGUAAUUAGGAGCUUGAAC | 2849 |
| 21567 | ACUCAACAUACUUCAUCUA | 1199 | 21567 | ACUCAACAUACUUCAUCUA | 1199 | 21585 | UAGAUGAAGUAUGUUGAGU | 2850 |
| 21585 | AUGAGGGGGGUUUACUAUC | 1200 | 21585 | AUGAGGGGGGUUUACUAUC | 1200 | 21603 | GAUAGUAAACCCCCCUCAU | 2851 |
| 21603 | CCUGAUGAAAUUUUUAGAU | 1201 | 21603 | CCUGAUGAAAUUUUUAGAU | 1201 | 21621 | AUCUAAAAAUUUCAUCAGG | 2852 |
| 21621 | UCAGACACUCUUUAUUUAA | 1202 | 21621 | UCAGACACUCUUUAUUUAA | 1202 | 21639 | UUAAAUAAAGAGUGUCUGA | 2853 |
| 21639 | ACUCAGGAUUUAUUUCUUC | 1203 | 21639 | ACUCAGGAUUUAUUUCUUC | 1203 | 21657 | GAAGAAAUAAAUCCUGAGU | 2854 |
| 21657 | CCAUUUUAUUCUAAUGUUA | 1204 | 21657 | CCAUUUUAUUCUAAUGUUA | 1204 | 21675 | UAACAUUAGAAUAAAAUGG | 2855 |
| 21675 | ACAGGGUUUCAUACUAUUA | 1205 | 21675 | ACAGGGUUUCAUACUAUUA | 1205 | 21693 | UAAUAGUAUGAAACCCUGU | 2856 |
| 21693 | AAUCAUACGUUUGGCAACC | 1206 | 21693 | AAUCAUACGUUUGGCAACC | 1206 | 21711 | GGUUGCCAAACGUAUGAUU | 2857 |
| 21711 | CCUGUCAUACCUUUUAAGG | 1207 | 21711 | CCUGUCAUACCUUUUAAGG | 1207 | 21729 | CCUUAAAAGGUAUGACAGG | 2858 |
| 21729 | GAUGGUAUUUAUUUUGCUG | 1208 | 21729 | GAUGGUAUUUAUUUUGCUG | 1208 | 21747 | CAGCAAAAUAAAUACCAUC | 2859 |
| 21747 | GCCACAGAGAAAUCAAAUG | 1209 | 21747 | GCCACAGAGAAAUCAAAUG | 1209 | 21765 | CAUUUGAUUUCUCUGUGGC | 2860 |
| 21765 | GUUGUCCGUGGUUGGGUUU | 1210 | 21765 | GUUGUCCGUGGUUGGGUUU | 1210 | 21783 | AAACCCAACCACGGACAAC | 2861 |
| 21783 | UUUGGUUCUACCAUGAACA | 1211 | 21783 | UUUGGUUCUACCAUGAACA | 1211 | 21801 | UGUUCAUGGUAGAACCAAA | 2862 |
| 21801 | AACAAGUCACAGUCGGUGA | 1212 | 21801 | AACAAGUCACAGUCGGUGA | 1212 | 21819 | UCACCGACUGUGACUUGUU | 2863 |
| 21819 | AUUAUUAUUAACAAUUCUA | 1213 | 21819 | AUUAUUAUUAACAAUUCUA | 1213 | 21837 | UAGAAUUGUUAAUAAUAAU | 2864 |
| 21837 | ACUAAUGUUGUUAUACGAG | 1214 | 21837 | ACUAAUGUUGUUAUACGAG | 1214 | 21855 | CUCGUAUAACAACAUUAGU | 2865 |
| 21855 | GCAUGUAACUUUGAAUUGU | 1215 | 21855 | GCAUGUAACUUUGAAUUGU | 1215 | 21873 | ACAAUUCAAAGUUACAUGC | 2866 |
| 21873 | UGUGACAACCCUUUCUUUG | 1216 | 21873 | UGUGACAACCCUUUCUUUG | 1216 | 21891 | CAAAGAAAGGGUUGUCACA | 2867 |
| 21891 | GCUGUUUCUAAACCCAUGG | 1217 | 21891 | GCUGUUUCUAAACCCAUGG | 1217 | 21909 | CCAUGGGUUUAGAAACAGC | 2868 |
| 21909 | GGUACACAGACACAUACUA | 1218 | 21909 | GGUACACAGACACAUACUA | 1218 | 21927 | UAGUAUGUGUCUGUGUACC | 2869 |
| 21927 | AUGAUAUUCGAUAAUGCAU | 1219 | 21927 | AUGAUAUUCGAUAAUGCAU | 1219 | 21945 | AUGCAUUAUCGAAUAUCAU | 2870 |
| 21945 | UUUAAUUGCACUUUCGAGU | 1220 | 21945 | UUUAAUUGCACUUUCGAGU | 1220 | 21963 | ACUCGAAAGUGCAAUUAAA | 2871 |
| 21963 | UACAUAUCUGAUGCCUUUU | 1221 | 21963 | UACAUAUCUGAUGCCUUUU | 1221 | 21981 | AAAAGGCAUCAGAUAUGUA | 2872 |
| 21981 | UCGCUUGAUGUUUCAGAAA | 1222 | 21981 | UCGCUUGAUGUUUCAGAAA | 1222 | 21999 | UUUCUGAAACAUCAAGCGA | 2873 |
| 21999 | AAGUCAGGUAAUUUUAAAC | 1223 | 21999 | AAGUCAGGUAAUUUUAAAC | 1223 | 22017 | GUUUAAAAUUACCUGACUU | 2874 |
| 22017 | CACUUACGAGAGUUUGUGU | 1224 | 22017 | CACUUACGAGAGUUUGUGU | 1224 | 22035 | ACACAAACUCUCGUAAGUG | 2875 |
| 22035 | UUUAAAAAUAAAGAUGGGU | 1225 | 22035 | UUUAAAAAUAAAGAUGGGU | 1225 | 22053 | ACCCAUCUUUAUUUUUAAA | 2876 |
| 22053 | UUUCUCUAUGUUUAUAAGG | 1226 | 22053 | UUUCUCUAUGUUUAUAAGG | 1226 | 22071 | CCUUAUAAACAUAGAGAAA | 2877 |
| 22071 | GGCUAUCAACCUAUAGAUG | 1227 | 22071 | GGCUAUCAACCUAUAGAUG | 1227 | 22089 | CAUCUAUAGGUUGAUAGCC | 2878 |
| 22089 | GUAGUUCGUGAUCUACCUU | 1228 | 22089 | GUAGUUCGUGAUCUACCUU | 1228 | 22107 | AAGGUAGAUCACGAACUAC | 2879 |
| 22107 | UCUGGUUUUAACACUUUGA | 1229 | 22107 | UCUGGUUUUAACACUUUGA | 1229 | 22125 | UCAAAGUGUUAAAACCAGA | 2880 |
| 22125 | AAACCUAUUUUUAAGUUGC | 1230 | 22125 | AAACCUAUUUUUAAGUUGC | 1230 | 22143 | GCAACUUAAAAAUAGGUUU | 2881 |
| 22143 | CCUCUUGGUAUUAACAUUA | 1231 | 22143 | CCUCUUGGUAUUAACAUUA | 1231 | 22161 | UAAUGUUAAUACCAAGAGG | 2882 |
| 22161 | ACAAAUUUUAGAGCCAUUC | 1232 | 22161 | ACAAAUUUUAGAGCCAUUC | 1232 | 22179 | GAAUGGCUCUAAAAUUUGU | 2883 |
| 22179 | CUUACAGCCUUUUCACCUG | 1233 | 22179 | CUUACAGCCUUUUCACCUG | 1233 | 22197 | CAGGUGAAAAGGCUGUAAG | 2884 |
| 22197 | GCUCAAGACAUUUGGGGCA | 1234 | 22197 | GCUCAAGACAUUUGGGGCA | 1234 | 22215 | UGCCCCAAAUGUCUUGAGC | 2885 |
| 22215 | ACGUCAGCUGCAGCCUAUU | 1235 | 22215 | ACGUCAGCUGCAGCCUAUU | 1235 | 22233 | AAUAGGCUGCAGCUGACGU | 2886 |
| 22233 | UUUGUUGGCUAUUUAAAGC | 1236 | 22233 | UUUGUUGGCUAUUUAAAGC | 1236 | 22251 | GCUUUAAAUAGCCAACAAA | 2887 |
| 22251 | CCAACUACAUUUAUGCUCA | 1237 | 22251 | CCAACUACAUUUAUGCUCA | 1237 | 22269 | UGAGCAUAAAUGUAGUUGG | 2888 |
| 22269 | AAGUAUGAUGAAAAUGGUA | 1238 | 22269 | AAGUAUGAUGAAAAUGGUA | 1238 | 22287 | UACCAUUUUCAUCAUACUU | 2889 |
| 22287 | ACAAUCACAGAUGCUGUUG | 1239 | 22287 | ACAAUCACAGAUGCUGUUG | 1239 | 22305 | CAACAGCAUCUGUGAUUGU | 2890 |
| 22305 | GAUUGUUCUCAAAAUCCAC | 1240 | 22305 | GAUUGUUCUCAAAAUCCAC | 1240 | 22323 | GUGGAUUUUGAGAACAAUC | 2891 |
| 22323 | CUUGCUGAACUCAAAUGCU | 1241 | 22323 | CUUGCUGAACUCAAAUGCU | 1241 | 22341 | AGCAUUUGAGUUCAGCAAG | 2892 |
| 22341 | UCUGUUAAGAGCUUUGAGA | 1242 | 22341 | UCUGUUAAGAGCUUUGAGA | 1242 | 22359 | UCUCAAAGCUCUUAACAGA | 2893 |
| 22359 | AUUGACAAAGGAAUUUACC | 1243 | 22359 | AUUGACAAAGGAAUUUACC | 1243 | 22377 | GGUAAAUUCCUUUGUCAAU | 2894 |
| 22377 | CAGACCUCUAAUUUCAGGG | 1244 | 22377 | CAGACCUCUAAUUUCAGGG | 1244 | 22395 | CCCUGAAAUUAGAGGUCUG | 2895 |
| 22395 | GUUGUUCCCUCAGGAGAUG | 1245 | 22395 | GUUGUUCCCUCAGGAGAUG | 1245 | 22413 | CAUCUCCUGAGGGAACAAC | 2896 |
| 22413 | GUUGUGAGAUUCCCUAAUA | 1246 | 22413 | GUUGUGAGAUUCCCUAAUA | 1246 | 22431 | UAUUAGGGAAUCUCACAAC | 2897 |
| 22431 | AUUACAAACUUGUGUCCUU | 1247 | 22431 | AUUACAAACUUGUGUCCUU | 1247 | 22449 | AAGGACACAAGUUUGUAAU | 2898 |
| 22449 | UUUGGAGAGGUUUUUAAUG | 1248 | 22449 | UUUGGAGAGGUUUUUAAUG | 1248 | 22467 | CAUUAAAAACCUCUCCAAA | 2899 |
| 22467 | GCUACUAAAUUCCCUUCUG | 1249 | 22467 | GCUACUAAAUUCCCUUCUG | 1249 | 22485 | CAGAAGGGAAUUUAGUAGC | 2900 |
| 22485 | GUCUAUGCAUGGGAGAGAA | 1250 | 22485 | GUCUAUGCAUGGGAGAGAA | 1250 | 22503 | UUCUCUCCCAUGCAUAGAC | 2901 |
| 22503 | AAAAAAAUUUCUAAUUGUG | 1251 | 22503 | AAAAAAAUUUCUAAUUGUG | 1251 | 22521 | CACAAUUAGAAAUUUUUUU | 2902 |
| 22521 | GUUGCUGAUUACUCUGUGC | 1252 | 22521 | GUUGCUGAUUACUCUGUGC | 1252 | 22539 | GCACAGAGUAAUCAGCAAC | 2903 |
| 22539 | CUCUACAACUCAACAUUUU | 1253 | 22539 | CUCUACAACUCAACAUUUU | 1253 | 22557 | AAAAUGUUGAGUUGUAGAG | 2904 |
| 22557 | UUUUCAACCUUUAAGUGCU | 1254 | 22557 | UUUUCAACCUUUAAGUGCU | 1254 | 22575 | AGCACUUAAAGGUUGAAAA | 2905 |
| 22575 | UAUGGCGUUUCUGCCACUA | 1255 | 22575 | UAUGGCGUUUCUGCCACUA | 1255 | 22593 | UAGUGGCAGAAACGCCAUA | 2906 |
| 22593 | AAGUUGAAUGAUCUUUGCU | 1256 | 22593 | AAGUUGAAUGAUCUUUGCU | 1256 | 22611 | AGCAAAGAUCAUUCAACUU | 2907 |
| 22611 | UUCUCCAAUGUCUAUGCAG | 1257 | 22611 | UUCUCCAAUGUCUAUGCAG | 1257 | 22629 | CUGCAUAGACAUUGGAGAA | 2908 |
| 22629 | GAUUCUUUUGUAGUCAAGG | 1258 | 22629 | GAUUCUUUUGUAGUCAAGG | 1258 | 22647 | CCUUGACUACAAAAGAAUC | 2909 |
| 22647 | GGAGAUGAUGUAAGACAAA | 1259 | 22647 | GGAGAUGAUGUAAGACAAA | 1259 | 22665 | UUUGUCUUACAUCAUCUCC | 2910 |
| 22665 | AUAGCGCCAGGACAAACUG | 1260 | 22665 | AUAGCGCCAGGACAAACUG | 1260 | 22683 | CAGUUUGUCCUGGCGCUAU | 2911 |
| 22683 | GGUGUUAUUGCUGAUUAUA | 1261 | 22683 | GGUGUUAUUGCUGAUUAUA | 1261 | 22701 | UAUAAUCAGCAAUAACACC | 2912 |
| 22701 | AAUUAUAAAUUGCCAGAUG | 1262 | 22701 | AAUUAUAAAUUGCCAGAUG | 1262 | 22719 | CAUCUGGCAAUUUAUAAUU | 2913 |
| 22719 | GAUUUCAUGGGUUGUGUCC | 1263 | 22719 | GAUUUCAUGGGUUGUGUCC | 1263 | 22737 | GGACACAACCCAUGAAAUC | 2914 |
| 22737 | CUUGCUUGGAAUACUAGGA | 1264 | 22737 | CUUGCUUGGAAUACUAGGA | 1264 | 22755 | UCCUAGUAUUCCAAGCAAG | 2915 |
| 22755 | AACAUUGAUGCUACUUCAA | 1265 | 22755 | AACAUUGAUGCUACUUCAA | 1265 | 22773 | UUGAAGUAGCAUCAAUGUU | 2916 |
| 22773 | ACUGGUAAUUAUAAUUAUA | 1266 | 22773 | ACUGGUAAUUAUAAUUAUA | 1266 | 22791 | UAUAAUUAUAAUUACCAGU | 2917 |
| 22791 | AAAUAUAGGUAUCUUAGAC | 1267 | 22791 | AAAUAUAGGUAUCUUAGAC | 1267 | 22809 | GUCUAAGAUACCUAUAUUU | 2918 |
| 22809 | CAUGGCAAGCUUAGGCCCU | 1268 | 22809 | CAUGGCAAGCUUAGGCCCU | 1268 | 22827 | AGGGCCUAAGCUUGCCAUG | 2919 |
| 22827 | UUUGAGAGAGACAUAUCUA | 1269 | 22827 | UUUGAGAGAGACAUAUCUA | 1269 | 22845 | UAGAUAUGUCUCUCUCAAA | 2920 |
| 22845 | AAUGUGCCUUUCUCCCCUG | 1270 | 22845 | AAUGUGCCUUUCUCCCCUG | 1270 | 22863 | CAGGGGAGAAAGGCACAUU | 2921 |
| 22863 | GAUGGCAAACCUUGCACCC | 1271 | 22863 | GAUGGCAAACCUUGCACCC | 1271 | 22881 | GGGUGCAAGGUUUGCCAUC | 2922 |
| 22881 | CCACCUGCUCUUAAUUGUU | 1272 | 22881 | CCACCUGCUCUUAAUUGUU | 1272 | 22899 | AACAAUUAAGAGCAGGUGG | 2923 |
| 22899 | UAUUGGCCAUUAAAUGAUU | 1273 | 22899 | UAUUGGCCAUUAAAUGAUU | 1273 | 22917 | AAUCAUUUAAUGGCCAAUA | 2924 |
| 22917 | UAUGGUUUUUACACCACUA | 1274 | 22917 | UAUGGUUUUUACACCACUA | 1274 | 22935 | UAGUGGUGUAAAAACCAUA | 2925 |
| 22935 | ACUGGCAUUGGCUACCAAC | 1275 | 22935 | ACUGGCAUUGGCUACCAAC | 1275 | 22953 | GUUGGUAGCCAAUGCCAGU | 2926 |
| 22953 | CCUUACAGAGUUGUAGUAC | 1276 | 22953 | CCUUACAGAGUUGUAGUAC | 1276 | 22971 | GUACUACAACUCUGUAAGG | 2927 |
| 22971 | CUUUCUUUUGAACUUUUAA | 1277 | 22971 | CUUUCUUUUGAACUUUUAA | 1277 | 22989 | UUAAAAGUUCAAAAGAAAG | 2928 |
| 22989 | AAUGCACCGGCCACGGUUU | 1278 | 22989 | AAUGCACCGGCCACGGUUU | 1278 | 23007 | AAACCGUGGCCGGUGCAUU | 2929 |
| 23007 | UGUGGACCAAAAUUAUCCA | 1279 | 23007 | UGUGGACCAAAAUUAUCCA | 1279 | 23025 | UGGAUAAUUUUGGUCCACA | 2930 |
| 23025 | ACUGACCUUAUUAAGAACC | 1280 | 23025 | ACUGACCUUAUUAAGAACC | 1280 | 23043 | GGUUCUUAAUAAGGUCAGU | 2931 |
| 23043 | CAGUGUGUCAAUUUUAAUU | 1281 | 23043 | CAGUGUGUCAAUUUUAAUU | 1281 | 23061 | AAUUAAAAUUGACACACUG | 2932 |
| 23061 | UUUAAUGGACUCACUGGUA | 1282 | 23061 | UUUAAUGGACUCACUGGUA | 1282 | 23079 | UACCAGUGAGUCCAUUAAA | 2933 |
| 23079 | ACUGGUGUGUUAACUCCUU | 1283 | 23079 | ACUGGUGUGUUAACUCCUU | 1283 | 23097 | AAGGAGUUAACACACCAGU | 2934 |
| 23097 | UCUUCAAAGAGAUUUCAAC | 1284 | 23097 | UCUUCAAAGAGAUUUCAAC | 1284 | 23115 | GUUGAAAUCUCUUUGAAGA | 2935 |
| 23115 | CCAUUUCAACAAUUUGGCC | 1285 | 23115 | CCAUUUCAACAAUUUGGCC | 1285 | 23133 | GGCCAAAUUGUUGAAAUGG | 2936 |
| 23133 | CGUGAUGUUUCUGAUUUCA | 1286 | 23133 | CGUGAUGUUUCUGAUUUCA | 1286 | 23151 | UGAAAUCAGAAACAUCACG | 2937 |
| 23151 | ACUGAUUCCGUUCGAGAUC | 1287 | 23151 | ACUGAUUCCGUUCGAGAUC | 1287 | 23169 | GAUCUCGAACGGAAUCAGU | 2938 |
| 23169 | CCUAAAACAUCUGAAAUAU | 1288 | 23169 | CCUAAAACAUCUGAAAUAU | 1288 | 23187 | AUAUUUCAGAUGUUUUAGG | 2939 |
| 23187 | UUAGACAUUUCACCUUGCG | 1289 | 23187 | UUAGACAUUUCACCUUGCG | 1289 | 23205 | CGCAAGGUGAAAUGUCUAA | 2940 |
| 23205 | GCUUUUGGGGGUGUAAGUG | 1290 | 23205 | GCUUUUGGGGGUGUAAGUG | 1290 | 23223 | CACUUACACCCCCAAAAGC | 2941 |
| 23223 | GUAAUUACACCUGGAACAA | 1291 | 23223 | GUAAUUACACCUGGAACAA | 1291 | 23241 | UUGUUCCAGGUGUAAUUAC | 2942 |
| 23241 | AAUGCUUCAUCUGAAGUUG | 1292 | 23241 | AAUGCUUCAUCUGAAGUUG | 1292 | 23259 | CAACUUCAGAUGAAGCAUU | 2943 |
| 23259 | GCUGUUCUAUAUCAAGAUG | 1293 | 23259 | GCUGUUCUAUAUCAAGAUG | 1293 | 23277 | CAUCUUGAUAUAGAACAGC | 2944 |
| 23277 | GUUAACUGCACUGAUGUUU | 1294 | 23277 | GUUAACUGCACUGAUGUUU | 1294 | 23295 | AAACAUCAGUGCAGUUAAC | 2945 |
| 23295 | UCUACAGCAAUUCAUGCAG | 1295 | 23295 | UCUACAGCAAUUCAUGCAG | 1295 | 23313 | CUGCAUGAAUUGCUGUAGA | 2946 |
| 23313 | GAUCAACUCACACCAGCUU | 1296 | 23313 | GAUCAACUCACACCAGCUU | 1296 | 23331 | AAGCUGGUGUGAGUUGAUC | 2947 |
| 23331 | UGGCGCAUAUAUUCUACUG | 1297 | 23331 | UGGCGCAUAUAUUCUACUG | 1297 | 23349 | CAGUAGAAUAUAUGCGCCA | 2948 |
| 23349 | GGAAACAAUGUAUUCCAGA | 1298 | 23349 | GGAAACAAUGUAUUCCAGA | 1298 | 23367 | UCUGGAAUACAUUGUUUCC | 2949 |
| 23367 | ACUCAAGCAGGCUGUCUUA | 1299 | 23367 | ACUCAAGCAGGCUGUCUUA | 1299 | 23385 | UAAGACAGCCUGCUUGAGU | 2950 |
| 23385 | AUAGGAGCUGAGCAUGUCG | 1300 | 23385 | AUAGGAGCUGAGCAUGUCG | 1300 | 23403 | CGACAUGCUCAGCUCCUAU | 2951 |
| 23403 | GACACUUCUUAUGAGUGCG | 1301 | 23403 | GACACUUCUUAUGAGUGCG | 1301 | 23421 | CGCACUCAUAAGAAGUGUC | 2952 |
| 23421 | GACAUUCCUAUUGGAGCUG | 1302 | 23421 | GACAUUCCUAUUGGAGCUG | 1302 | 23439 | CAGCUCCAAUAGGAAUGUC | 2953 |
| 23439 | GGCAUUUGUGCUAGUUACC | 1303 | 23439 | GGCAUUUGUGCUAGUUACC | 1303 | 23457 | GGUAACUAGCACAAAUGCC | 2954 |
| 23457 | CAUACAGUUUCUUUAUUAC | 1304 | 23457 | CAUACAGUUUCUUUAUUAC | 1304 | 23475 | GUAAUAAAGAAACUGUAUG | 2955 |
| 23475 | CGUAGUACUAGCCAAAAAU | 1305 | 23475 | CGUAGUACUAGCCAAAAAU | 1305 | 23493 | AUUUUUGGCUAGUACUACG | 2956 |
| 23493 | UCUAUUGUGGCUUAUACUA | 1306 | 23493 | UCUAUUGUGGCUUAUACUA | 1306 | 23511 | UAGUAUAAGCCACAAUAGA | 2957 |
| 23511 | AUGUCUUUAGGUGCUGAUA | 1307 | 23511 | AUGUCUUUAGGUGCUGAUA | 1307 | 23529 | UAUCAGCACCUAAAGACAU | 2958 |
| 23529 | AGUUCAAUUGCUUACUCUA | 1308 | 23529 | AGUUCAAUUGCUUACUCUA | 1308 | 23547 | UAGAGUAAGCAAUUGAACU | 2959 |
| 23547 | AAUAACACCAUUGCUAUAC | 1309 | 23547 | AAUAACACCAUUGCUAUAC | 1309 | 23565 | GUAUAGCAAUGGUGUUAUU | 2960 |
| 23565 | CCUACUAACUUUUCAAUUA | 1310 | 23565 | CCUACUAACUUUUCAAUUA | 1310 | 23583 | UAAUUGAAAAGUUAGUAGG | 2961 |
| 23583 | AGCAUUACUACAGAAGUAA | 1311 | 23583 | AGCAUUACUACAGAAGUAA | 1311 | 23601 | UUACUUCUGUAGUAAUGCU | 2962 |
| 23601 | AUGCCUGUUUCUAUGGCUA | 1312 | 23601 | AUGCCUGUUUCUAUGGCUA | 1312 | 23619 | UAGCCAUAGAAACAGGCAU | 2963 |
| 23619 | AAAACCUCCGUAGAUUGUA | 1313 | 23619 | AAAACCUCCGUAGAUUGUA | 1313 | 23637 | UACAAUCUACGGAGGUUUU | 2964 |
| 23637 | AAUAUGUACAUCUGCGGAG | 1314 | 23637 | AAUAUGUACAUCUGCGGAG | 1314 | 23655 | CUCCGCAGAUGUACAUAUU | 2965 |
| 23655 | GAUUCUACUGAAUGUGCUA | 1315 | 23655 | GAUUCUACUGAAUGUGCUA | 1315 | 23673 | UAGCACAUUCAGUAGAAUC | 2966 |
| 23673 | AAUUUGCUUCUCCAAUAUG | 1316 | 23673 | AAUUUGCUUCUCCAAUAUG | 1316 | 23691 | CAUAUUGGAGAAGCAAAUU | 2967 |
| 23691 | GGUAGCUUUUGCACACAAC | 1317 | 23691 | GGUAGCUUUUGCACACAAC | 1317 | 23709 | GUUGUGUGCAAAAGCUACC | 2968 |
| 23709 | CUAAAUCGUGCACUCUCAG | 1318 | 23709 | CUAAAUCGUGCACUCUCAG | 1318 | 23727 | CUGAGAGUGCACGAUUUAG | 2969 |
| 23727 | GGUAUUGCUGCUGAACAGG | 1319 | 23727 | GGUAUUGCUGCUGAACAGG | 1319 | 23745 | CCUGUUCAGCAGCAAUACC | 2970 |
| 23745 | GAUCGCAACACACGUGAAG | 1320 | 23745 | GAUCGCAACACACGUGAAG | 1320 | 23763 | CUUCACGUGUGUUGCGAUC | 2971 |
| 23763 | GUGUUCGCUCAAGUCAAAC | 1321 | 23763 | GUGUUCGCUCAAGUCAAAC | 1321 | 23781 | GUUUGACUUGAGCGAACAC | 2972 |
| 23781 | CAAAUGUACAAAACCCCAA | 1322 | 23781 | CAAAUGUACAAAACCCCAA | 1322 | 23799 | UUGGGGUUUUGUACAUUUG | 2973 |
| 23799 | ACUUUGAAAUAUUUUGGUG | 1323 | 23799 | ACUUUGAAAUAUUUUGGUG | 1323 | 23817 | CACCAAAAUAUUUCAAAGU | 2974 |
| 23817 | GGUUUUAAUUUUUCACAAA | 1324 | 23817 | GGUUUUAAUUUUUCACAAA | 1324 | 23835 | UUUGUGAAAAAUUAAAACC | 2975 |
| 23835 | AUAUUACCUGACCCUCUAA | 1325 | 23835 | AUAUUACCUGACCCUCUAA | 1325 | 23853 | UUAGAGGGUCAGGUAAUAU | 2976 |
| 23853 | AAGCCAACUAAGAGGUCUU | 1326 | 23853 | AAGCCAACUAAGAGGUCUU | 1326 | 23871 | AAGACCUCUUAGUUGGCUU | 2977 |
| 23871 | UUUAUUGAGGACUUGCUCU | 1327 | 23871 | UUUAUUGAGGACUUGCUCU | 1327 | 23889 | AGAGCAAGUCCUCAAUAAA | 2978 |
| 23889 | UUUAAUAAGGUGACACUCG | 1328 | 23889 | UUUAAUAAGGUGACACUCG | 1328 | 23907 | CGAGUGUCACCUUAUUAAA | 2979 |
| 23907 | GCUGAUGCUGGCUUCAUGA | 1329 | 23907 | GCUGAUGCUGGCUUCAUGA | 1329 | 23925 | UCAUGAAGCCAGCAUCAGC | 2980 |
| 23925 | AAGCAAUAUGGCGAAUGCC | 1330 | 23925 | AAGCAAUAUGGCGAAUGCC | 1330 | 23943 | GGCAUUCGCCAUAUUGCUU | 2981 |
| 23943 | CUAGGUGAUAUUAAUGCUA | 1331 | 23943 | CUAGGUGAUAUUAAUGCUA | 1331 | 23961 | UAGCAUUAAUAUCACCUAG | 2982 |
| 23961 | AGAGAUCUCAUUUGUGCGC | 1332 | 23961 | AGAGAUCUCAUUUGUGCGC | 1332 | 23979 | GCGCACAAAUGAGAUCUCU | 2983 |
| 23979 | CAGAAGUUCAAUGGACUUA | 1333 | 23979 | CAGAAGUUCAAUGGACUUA | 1333 | 23997 | UAAGUCCAUUGAACUUCUG | 2984 |
| 23997 | ACAGUGUUGCCACCUCUGC | 1334 | 23997 | ACAGUGUUGCCACCUCUGC | 1334 | 24015 | GCAGAGGUGGCAACACUGU | 2985 |
| 24015 | CUCACUGAUGAUAUGAUUG | 1335 | 24015 | CUCACUGAUGAUAUGAUUG | 1335 | 24033 | CAAUCAUAUCAUCAGUGAG | 2986 |
| 24033 | GCUGCCUACACUGCUGCUC | 1336 | 24033 | GCUGCCUACACUGCUGCUC | 1336 | 24051 | GAGCAGCAGUGUAGGCAGC | 2987 |
| 24051 | CUAGUUAGUGGUACUGCCA | 1337 | 24051 | CUAGUUAGUGGUACUGCCA | 1337 | 24069 | UGGCAGUACCACUAACUAG | 2988 |
| 24069 | ACUGCUGGAUGGACAUUUG | 1338 | 24069 | ACUGCUGGAUGGACAUUUG | 1338 | 24087 | CAAAUGUCCAUCCAGCAGU | 2989 |
| 24087 | GGUGCUGGCGCUGCUCUUC | 1339 | 24087 | GGUGCUGGCGCUGCUCUUC | 1339 | 24105 | GAAGAGCAGCGCCAGCACC | 2990 |
| 24105 | CAAAUACCUUUUGCUAUGC | 1340 | 24105 | CAAAUACCUUUUGCUAUGC | 1340 | 24123 | GCAUAGCAAAAGGUAUUUG | 2991 |
| 24123 | CAAAUGGCAUAUAGGUUCA | 1341 | 24123 | CAAAUGGCAUAUAGGUUCA | 1341 | 24141 | UGAACCUAUAUGCCAUUUG | 2992 |
| 24141 | AAUGGCAUUGGAGUUACCC | 1342 | 24141 | AAUGGCAUUGGAGUUACCC | 1342 | 24159 | GGGUAACUCCAAUGCCAUU | 2993 |
| 24159 | CAAAAUGUUCUCUAUGAGA | 1343 | 24159 | CAAAAUGUUCUCUAUGAGA | 1343 | 24177 | UCUCAUAGAGAACAUUUUG | 2994 |
| 24177 | AACCAAAAACAAAUCGCCA | 1344 | 24177 | AACCAAAAACAAAUCGCCA | 1344 | 24195 | UGGCGAUUUGUUUUUGGUU | 2995 |
| 24195 | AACCAAUUUAACAAGGCGA | 1345 | 24195 | AACCAAUUUAACAAGGCGA | 1345 | 24213 | UCGCCUUGUUAAAUUGGUU | 2996 |
| 24213 | AUUAGUCAAAUUCAAGAAU | 1346 | 24213 | AUUAGUCAAAUUCAAGAAU | 1346 | 24231 | AUUCUUGAAUUUGACUAAU | 2997 |
| 24231 | UCACUUACAACAACAUCAA | 1347 | 24231 | UCACUUACAACAACAUCAA | 1347 | 24249 | UUGAUGUUGUUGUAAGUGA | 2998 |
| 24249 | ACUGCAUUGGGCAAGCUGC | 1348 | 24249 | ACUGCAUUGGGCAAGCUGC | 1348 | 24267 | GCAGCUUGCCCAAUGCAGU | 2999 |
| 24267 | CAAGACGUUGUUAACCAGA | 1349 | 24267 | CAAGACGUUGUUAACCAGA | 1349 | 24285 | UCUGGUUAACAACGUCUUG | 3000 |
| 24285 | AAUGCUCAAGCAUUAAACA | 1350 | 24285 | AAUGCUCAAGCAUUAAACA | 1350 | 24303 | UGUUUAAUGCUUGAGCAUU | 3001 |
| 24303 | ACACUUGUUAAACAACUUA | 1351 | 24303 | ACACUUGUUAAACAACUUA | 1351 | 24321 | UAAGUUGUUUAACAAGUGU | 3002 |
| 24321 | AGCUCUAAUUUUGGUGCAA | 1352 | 24321 | AGCUCUAAUUUUGGUGCAA | 1352 | 24339 | UUGCACCAAAAUUAGAGCU | 3003 |
| 24339 | AUUUCAAGUGUGCUAAAUG | 1353 | 24339 | AUUUCAAGUGUGCUAAAUG | 1353 | 24357 | CAUUUAGCACACUUGAAAU | 3004 |
| 24357 | GAUAUCCUUUCGCGACUUG | 1354 | 24357 | GAUAUCCUUUCGCGACUUG | 1354 | 24375 | CAAGUCGCGAAAGGAUAUC | 3005 |
| 24375 | GAUAAAGUCGAGGCGGAGG | 1355 | 24375 | GAUAAAGUCGAGGCGGAGG | 1355 | 24393 | CCUCCGCCUCGACUUUAUC | 3006 |
| 24393 | GUACAAAUUGACAGGUUAA | 1356 | 24393 | GUACAAAUUGACAGGUUAA | 1356 | 24411 | UUAACCUGUCAAUUUGUAC | 3007 |
| 24411 | AUUACAGGCAGACUUCAAA | 1357 | 24411 | AUUACAGGCAGACUUCAAA | 1357 | 24429 | UUUGAAGUCUGCCUGUAAU | 3008 |
| 24429 | AGCCUUCAAACCUAUGUAA | 1358 | 24429 | AGCCUUCAAACCUAUGUAA | 1358 | 24447 | UUACAUAGGUUUGAAGGCU | 3009 |
| 24447 | ACACAACAACUAAUCAGGG | 1359 | 24447 | ACACAACAACUAAUCAGGG | 1359 | 24465 | CCCUGAUUAGUUGUUGUGU | 3010 |
| 24465 | GCUGCUGAAAUCAGGGCUU | 1360 | 24465 | GCUGCUGAAAUCAGGGCUU | 1360 | 24483 | AAGCCCUGAUUUCAGCAGC | 3011 |
| 24483 | UCUGCUAAUCUUGCUGCUA | 1361 | 24483 | UCUGCUAAUCUUGCUGCUA | 1361 | 24501 | UAGCAGCAAGAUUAGCAGA | 3012 |
| 24501 | ACUAAAAUGUCUGAGUGUG | 1362 | 24501 | ACUAAAAUGUCUGAGUGUG | 1362 | 24519 | CACACUCAGACAUUUUAGU | 3013 |
| 24519 | GUUCUUGGACAAUCAAAAA | 1363 | 24519 | GUUCUUGGACAAUCAAAAA | 1363 | 24537 | UUUUUGAUUGUCCAAGAAC | 3014 |
| 24537 | AGAGUUGACUUUUGUGGAA | 1364 | 24537 | AGAGUUGACUUUUGUGGAA | 1364 | 24555 | UUCCACAAAAGUCAACUCU | 3015 |
| 24555 | AAGGGCUACCACCUUAUGU | 1365 | 24555 | AAGGGCUACCACCUUAUGU | 1365 | 24573 | ACAUAAGGUGGUAGCCCUU | 3016 |
| 24573 | UCCUUCCCACAAGCAGCCC | 1366 | 24573 | UCCUUCCCACAAGCAGCCC | 1366 | 24591 | GGGCUGCUUGUGGGAAGGA | 3017 |
| 24591 | CCGCAUGGUGUUGUCUUCC | 1367 | 24591 | CCGCAUGGUGUUGUCUUCC | 1367 | 24609 | GGAAGACAACACCAUGCGG | 3018 |
| 24609 | CUACAUGUCACGUAUGUGC | 1368 | 24609 | CUACAUGUCACGUAUGUGC | 1368 | 24627 | GCACAUACGUGACAUGUAG | 3019 |
| 24627 | CCAUCCCAGGAGAGGAACU | 1369 | 24627 | CCAUCCCAGGAGAGGAACU | 1369 | 24645 | AGUUCCUCUCCUGGGAUGG | 3020 |
| 24645 | UUCACCACAGCGCCAGCAA | 1370 | 24645 | UUCACCACAGCGCCAGCAA | 1370 | 24663 | UUGCUGGCGCUGUGGUGAA | 3021 |
| 24663 | AUUUGUCAUGAAGGCAAAG | 1371 | 24663 | AUUUGUCAUGAAGGCAAAG | 1371 | 24681 | CUUUGCCUUCAUGACAAAU | 3022 |
| 24681 | GCAUACUUCCCUCGUGAAG | 1372 | 24681 | GCAUACUUCCCUCGUGAAG | 1372 | 24699 | CUUCACGAGGGAAGUAUGC | 3023 |
| 24699 | GGUGUUUUUGUGUUUAAUG | 1373 | 24699 | GGUGUUUUUGUGUUUAAUG | 1373 | 24717 | CAUUAAACACAAAAACACC | 3024 |
| 24717 | GGCACUUCUUGGUUUAUUA | 1374 | 24717 | GGCACUUCUUGGUUUAUUA | 1374 | 24735 | UAAUAAACCAAGAAGUGCC | 3025 |
| 24735 | ACACAGAGGAACUUCUUUU | 1375 | 24735 | ACACAGAGGAACUUCUUUU | 1375 | 24753 | AAAAGAAGUUCCUCUGUGU | 3026 |
| 24753 | UCUCCACAAAUAAUUACUA | 1376 | 24753 | UCUCCACAAAUAAUUACUA | 1376 | 24771 | UAGUAAUUAUUUGUGGAGA | 3027 |
| 24771 | ACAGACAAUACAUUUGUCU | 1377 | 24771 | ACAGACAAUACAUUUGUCU | 1377 | 24789 | AGACAAAUGUAUUGUCUGU | 3028 |
| 24789 | UCAGGAAAUUGUGAUGUCG | 1378 | 24789 | UCAGGAAAUUGUGAUGUCG | 1378 | 24807 | CGACAUCACAAUUUCCUGA | 3029 |
| 24807 | GUUAUUGGCAUCAUUAACA | 1379 | 24807 | GUUAUUGGCAUCAUUAACA | 1379 | 24825 | UGUUAAUGAUGCCAAUAAC | 3030 |
| 24825 | AACACAGUUUAUGAUCCUC | 1380 | 24825 | AACACAGUUUAUGAUCCUC | 1380 | 24843 | GAGGAUCAUAAACUGUGUU | 3031 |
| 24843 | CUGCAACCUGAGCUUGACU | 1381 | 24843 | CUGCAACCUGAGCUUGACU | 1381 | 24861 | AGUCAAGCUCAGGUUGCAG | 3032 |
| 24861 | UCAUUCAAAGAAGAGCUGG | 1382 | 24861 | UCAUUCAAAGAAGAGCUGG | 1382 | 24879 | CCAGCUCUUCUUUGAAUGA | 3033 |
| 24879 | GACAAGUACUUCAAAAAUC | 1383 | 24879 | GACAAGUACUUCAAAAAUC | 1383 | 24897 | GAUUUUUGAAGUACUUGUC | 3034 |
| 24897 | CAUACAUCACCAGAUGUUG | 1384 | 24897 | CAUACAUCACCAGAUGUUG | 1384 | 24915 | CAACAUCUGGUGAUGUAUG | 3035 |
| 24915 | GAUCUUGGCGACAUUUCAG | 1385 | 24915 | GAUCUUGGCGACAUUUCAG | 1385 | 24933 | CUGAAAUGUCGCCAAGAUC | 3036 |
| 24933 | GGCAUUAACGCUUCUGUCG | 1386 | 24933 | GGCAUUAACGCUUCUGUCG | 1386 | 24951 | CGACAGAAGCGUUAAUGCC | 3037 |
| 24951 | GUCAACAUUCAAAAAGAAA | 1387 | 24951 | GUCAACAUUCAAAAAGAAA | 1387 | 24969 | UUUCUUUUUGAAUGUUGAC | 3038 |
| 24969 | AUUGACCGCCUCAAUGAGG | 1388 | 24969 | AUUGACCGCCUCAAUGAGG | 1388 | 24987 | CCUCAUUGAGGCGGUCAAU | 3039 |
| 24987 | GUCGCUAAAAAUUUAAAUG | 1389 | 24987 | GUCGCUAAAAAUUUAAAUG | 1389 | 25005 | CAUUUAAAUUUUUAGCGAC | 3040 |
| 25005 | GAAUCACUCAUUGACCUUC | 1390 | 25005 | GAAUCACUCAUUGACCUUC | 1390 | 25023 | GAAGGUCAAUGAGUGAUUC | 3041 |
| 25023 | CAAGAAUUGGGAAAAUAUG | 1391 | 25023 | CAAGAAUUGGGAAAAUAUG | 1391 | 25041 | CAUAUUUUCCCAAUUCUUG | 3042 |
| 25041 | GAGCAAUAUAUUAAAUGGC | 1392 | 25041 | GAGCAAUAUAUUAAAUGGC | 1392 | 25059 | GCCAUUUAAUAUAUUGCUC | 3043 |
| 25059 | CCUUGGUAUGUUUGGCUCG | 1393 | 25059 | CCUUGGUAUGUUUGGCUCG | 1393 | 25077 | CGAGCCAAACAUACCAAGG | 3044 |
| 25077 | GGCUUCAUUGCUGGACUAA | 1394 | 25077 | GGCUUCAUUGCUGGACUAA | 1394 | 25095 | UUAGUCCAGCAAUGAAGCC | 3045 |
| 25095 | AUUGCCAUCGUCAUGGUUA | 1395 | 25095 | AUUGCCAUCGUCAUGGUUA | 1395 | 25113 | UAACCAUGACGAUGGCAAU | 3046 |
| 25113 | ACAAUCUUGCUUUGUUGCA | 1396 | 25113 | ACAAUCUUGCUUUGUUGCA | 1396 | 25131 | UGCAACAAAGCAAGAUUGU | 3047 |
| 25131 | AUGACUAGUUGUUGCAGUU | 1397 | 25131 | AUGACUAGUUGUUGCAGUU | 1397 | 25149 | AACUGCAACAACUAGUCAU | 3048 |
| 25149 | UGCCUCAAGGGUGCAUGCU | 1398 | 25149 | UGCCUCAAGGGUGCAUGCU | 1398 | 25167 | AGCAUGCACCCUUGAGGCA | 3049 |
| 25167 | UCUUGUGGUUCUUGCUGCA | 1399 | 25167 | UCUUGUGGUUCUUGCUGCA | 1399 | 25185 | UGCAGCAAGAACCACAAGA | 3050 |
| 25185 | AAGUUUGAUGAGGAUGACU | 1400 | 25185 | AAGUUUGAUGAGGAUGACU | 1400 | 25203 | AGUCAUCCUCAUCAAACUU | 3051 |
| 25203 | UCUGAGCCAGUUCUCAAGG | 1401 | 25203 | UCUGAGCCAGUUCUCAAGG | 1401 | 25221 | CCUUGAGAACUGGCUCAGA | 3052 |
| 25221 | GGUGUCAAAUUACAUUACA | 1402 | 25221 | GGUGUCAAAUUACAUUACA | 1402 | 25239 | UGUAAUGUAAUUUGACACC | 3053 |
| 25239 | ACAUAAACGAACUUAUGGA | 1403 | 25239 | ACAUAAACGAACUUAUGGA | 1403 | 25257 | UCCAUAAGUUCGUUUAUGU | 3054 |
| 25257 | AUUUGUUUAUGAGAUUUUU | 1404 | 25257 | AUUUGUUUAUGAGAUUUUU | 1404 | 25275 | AAAAAUCUCAUAAACAAAU | 3055 |
| 25275 | UUACUCUUGGAUCAAUUAC | 1405 | 25275 | UUACUCUUGGAUCAAUUAC | 1405 | 25293 | GUAAUUGAUCCAAGAGUAA | 3056 |
| 25293 | CUGCACAGCCAGUAAAAAU | 1406 | 25293 | CUGCACAGCCAGUAAAAAU | 1406 | 25311 | AUUUUUACUGGCUGUGCAG | 3057 |
| 25311 | UUGACAAUGCUUCUCCUGC | 1407 | 25311 | UUGACAAUGCUUCUCCUGC | 1407 | 25329 | GCAGGAGAAGCAUUGUCAA | 3058 |
| 25329 | CAAGUACUGUUCAUGCUAC | 1408 | 25329 | CAAGUACUGUUCAUGCUAC | 1408 | 25347 | GUAGCAUGAACAGUACUUG | 3059 |
| 25347 | CAGCAACGAUACCGCUACA | 1409 | 25347 | CAGCAACGAUACCGCUACA | 1409 | 25365 | UGUAGCGGUAUCGUUGCUG | 3060 |
| 25365 | AAGCCUCACUCCCUUUCGG | 1410 | 25365 | AAGCCUCACUCCCUUUCGG | 1410 | 25383 | CCGAAAGGGAGUGAGGCUU | 3061 |
| 25383 | GAUGGCUUGUUAUUGGCGU | 1411 | 25383 | GAUGGCUUGUUAUUGGCGU | 1411 | 25401 | ACGCCAAUAACAAGCCAUC | 3062 |
| 25401 | UUGCAUUUCUUGCUGUUUU | 1412 | 25401 | UUGCAUUUCUUGCUGUUUU | 1412 | 25419 | AAAACAGCAAGAAAUGCAA | 3063 |
| 25419 | UUCAGAGCGCUACCAAAAU | 1413 | 25419 | UUCAGAGCGCUACCAAAAU | 1413 | 25437 | AUUUUGGUAGCGCUCUGAA | 3064 |
| 25437 | UAAUUGCGCUCAAUAAAAG | 1414 | 25437 | UAAUUGCGCUCAAUAAAAG | 1414 | 25455 | CUUUUAUUGAGCGCAAUUA | 3065 |
| 25455 | GAUGGCAGCUAGCCCUUUA | 1415 | 25455 | GAUGGCAGCUAGCCCUUUA | 1415 | 25473 | UAAAGGGCUAGCUGCCAUC | 3066 |
| 25473 | AUAAGGGCUUCCAGUUCAU | 1416 | 25473 | AUAAGGGCUUCCAGUUCAU | 1416 | 25491 | AUGAACUGGAAGCCCUUAU | 3067 |
| 25491 | UUUGCAAUUUACUGCUGCU | 1417 | 25491 | UUUGCAAUUUACUGCUGCU | 1417 | 25509 | AGCAGCAGUAAAUUGCAAA | 3068 |
| 25509 | UAUUUGUUACCAUCUAUUC | 1418 | 25509 | UAUUUGUUACCAUCUAUUC | 1418 | 25527 | GAAUAGAUGGUAACAAAUA | 3069 |
| 25527 | CACAUCUUUUGCUUGUCGC | 1419 | 25527 | CACAUCUUUUGCUUGUCGC | 1419 | 25545 | GCGACAAGCAAAAGAUGUG | 3070 |
| 25545 | CUGCAGGUAUGGAGGCGCA | 1420 | 25545 | CUGCAGGUAUGGAGGCGCA | 1420 | 25563 | UGCGCCUCCAUACCUGCAG | 3071 |
| 25563 | AAUUUUUGUACCUCUAUGC | 1421 | 25563 | AAUUUUUGUACCUCUAUGC | 1421 | 25581 | GCAUAGAGGUACAAAAAUU | 3072 |
| 25581 | CCUUGAUAUAUUUUCUACA | 1422 | 25581 | CCUUGAUAUAUUUUCUACA | 1422 | 25599 | UGUAGAAAAUAUAUCAAGG | 3073 |
| 25599 | AAUGCAUCAACGCAUGUAG | 1423 | 25599 | AAUGCAUCAACGCAUGUAG | 1423 | 25617 | CUACAUGCGUUGAUGCAUU | 3074 |
| 25617 | GAAUUAUUAUGAGAUGUUG | 1424 | 25617 | GAAUUAUUAUGAGAUGUUG | 1424 | 25635 | CAACAUCUCAUAAUAAUUC | 3075 |
| 25635 | GGCUUUGUUGGAAGUGCAA | 1425 | 25635 | GGCUUUGUUGGAAGUGCAA | 1425 | 25653 | UUGCACUUCCAACAAAGCC | 3076 |
| 25653 | AAUCCAAGAACCCAUUACU | 1426 | 25653 | AAUCCAAGAACCCAUUACU | 1426 | 25671 | AGUAAUGGGUUCUUGGAUU | 3077 |
| 25671 | UUUAUGAUGCCAACUACUU | 1427 | 25671 | UUUAUGAUGCCAACUACUU | 1427 | 25689 | AAGUAGUUGGCAUCAUAAA | 3078 |
| 25689 | UUGUUUGCUGGCACACACA | 1428 | 25689 | UUGUUUGCUGGCACACACA | 1428 | 25707 | UGUGUGUGCCAGCAAACAA | 3079 |
| 25707 | AUAACUAUGACUACUGUAU | 1429 | 25707 | AUAACUAUGACUACUGUAU | 1429 | 25725 | AUACAGUAGUCAUAGUUAU | 3080 |
| 25725 | UACCAUAUAACAGUGUCAC | 1430 | 25725 | UACCAUAUAACAGUGUCAC | 1430 | 25743 | GUGACACUGUUAUAUGGUA | 3081 |
| 25743 | CAGAUACAAUUGUCGUUAC | 1431 | 25743 | CAGAUACAAUUGUCGUUAC | 1431 | 25761 | GUAACGACAAUUGUAUCUG | 3082 |
| 25761 | CUGAAGGUGACGGCAUUUC | 1432 | 25761 | CUGAAGGUGACGGCAUUUC | 1432 | 25779 | GAAAUGCCGUCACCUUCAG | 3083 |
| 25779 | CAACACCAAAACUCAAAGA | 1433 | 25779 | CAACACCAAAACUCAAAGA | 1433 | 25797 | UCUUUGAGUUUUGGUGUUG | 3084 |
| 25797 | AAGACUACCAAAUUGGUGG | 1434 | 25797 | AAGACUACCAAAUUGGUGG | 1434 | 25815 | CCACCAAUUUGGUAGUCUU | 3085 |
| 25815 | GUUAUUCUGAGGAUAGGCA | 1435 | 25815 | GUUAUUCUGAGGAUAGGCA | 1435 | 25833 | UGCCUAUCCUCAGAAUAAC | 3086 |
| 25833 | ACUCAGGUGUUAAAGACUA | 1436 | 25833 | ACUCAGGUGUUAAAGACUA | 1436 | 25851 | UAGUCUUUAACACCUGAGU | 3087 |
| 25851 | AUGUCGUUGUACAUGGCUA | 1437 | 25851 | AUGUCGUUGUACAUGGCUA | 1437 | 25869 | UAGCCAUGUACAACGACAU | 3088 |
| 25869 | AUUUCACCGAAGUUUACUA | 1438 | 25869 | AUUUCACCGAAGUUUACUA | 1438 | 25887 | UAGUAAACUUCGGUGAAAU | 3089 |
| 25887 | ACCAGCUUGAGUCUACACA | 1439 | 25887 | ACCAGCUUGAGUCUACACA | 1439 | 25905 | UGUGUAGACUCAAGCUGGU | 3090 |
| 25905 | AAAUUACUACAGACACUGG | 1440 | 25905 | AAAUUACUACAGACACUGG | 1440 | 25923 | CCAGUGUCUGUAGUAAUUU | 3091 |
| 25923 | GUAUUGAAAAUGCUACAUU | 1441 | 25923 | GUAUUGAAAAUGCUACAUU | 1441 | 25941 | AAUGUAGCAUUUUCAAUAC | 3092 |
| 25941 | UCUUCAUCUUUAACAAGCU | 1442 | 25941 | UCUUCAUCUUUAACAAGCU | 1442 | 25959 | AGCUUGUUAAAGAUGAAGA | 3093 |
| 25959 | UUGUUAAAGACCCACCGAA | 1443 | 25959 | UUGUUAAAGACCCACCGAA | 1443 | 25977 | UUCGGUGGGUCUUUAACAA | 3094 |
| 25977 | AUGUGCAAAUACACACAAU | 1444 | 25977 | AUGUGCAAAUACACACAAU | 1444 | 25995 | AUUGUGUGUAUUUGCACAU | 3095 |
| 25995 | UCGACGGCUCUUCAGGAGU | 1445 | 25995 | UCGACGGCUCUUCAGGAGU | 1445 | 26013 | ACUCCUGAAGAGCCGUCGA | 3096 |
| 26013 | UUGCUAAUCCAGCAAUGGA | 1446 | 26013 | UUGCUAAUCCAGCAAUGGA | 1446 | 26031 | UCCAUUGCUGGAUUAGCAA | 3097 |
| 26031 | AUCCAAUUUAUGAUGAGCC | 1447 | 26031 | AUCCAAUUUAUGAUGAGCC | 1447 | 26049 | GGCUCAUCAUAAAUUGGAU | 3098 |
| 26049 | CGACGACGACUACUAGCGU | 1448 | 26049 | CGACGACGACUACUAGCGU | 1448 | 26067 | ACGCUAGUAGUCGUCGUCG | 3099 |
| 26067 | UGCCUUUGUAAGCACAAGA | 1449 | 26067 | UGCCUUUGUAAGCACAAGA | 1449 | 26085 | UCUUGUGCUUACAAAGGCA | 3100 |
| 26085 | AAAGUGAGUACGAACUUAU | 1450 | 26085 | AAAGUGAGUACGAACUUAU | 1450 | 26103 | AUAAGUUCGUACUCACUUU | 3101 |
| 26103 | UGUACUCAUUCGUUUCGGA | 1451 | 26103 | UGUACUCAUUCGUUUCGGA | 1451 | 26121 | UCCGAAACGAAUGAGUACA | 3102 |
| 26121 | AAGAAACAGGUACGUUAAU | 1452 | 26121 | AAGAAACAGGUACGUUAAU | 1452 | 26139 | AUUAACGUACCUGUUUCUU | 3103 |
| 26139 | UAGUUAAUAGCGUACUUCU | 1453 | 26139 | UAGUUAAUAGCGUACUUCU | 1453 | 26157 | AGAAGUACGCUAUUAACUA | 3104 |
| 26157 | UUUUUCUUGCUUUCGUGGU | 1454 | 26157 | UUUUUCUUGCUUUCGUGGU | 1454 | 26175 | ACCACGAAAGCAAGAAAAA | 3105 |
| 26175 | UAUUCUUGCUAGUCACACU | 1455 | 26175 | UAUUCUUGCUAGUCACACU | 1455 | 26193 | AGUGUGACUAGCAAGAAUA | 3106 |
| 26193 | UAGCCAUCCUUACUGCGCU | 1456 | 26193 | UAGCCAUCCUUACUGCGCU | 1456 | 26211 | AGCGCAGUAAGGAUGGCUA | 3107 |
| 26211 | UUCGAUUGUGUGCGUACUG | 1457 | 26211 | UUCGAUUGUGUGCGUACUG | 1457 | 26229 | CAGUACGCACACAAUCGAA | 3108 |
| 26229 | GCUGCAAUAUUGUUAACGU | 1458 | 26229 | GCUGCAAUAUUGUUAACGU | 1458 | 26247 | ACGUUAACAAUAUUGCAGC | 3109 |
| 26247 | UGAGUUUAGUAAAACCAAC | 1459 | 26247 | UGAGUUUAGUAAAACCAAC | 1459 | 26265 | GUUGGUUUUACUAAACUCA | 3110 |
| 26265 | CGGUUUACGUCUACUCGCG | 1460 | 26265 | CGGUUUACGUCUACUCGCG | 1460 | 26283 | CGCGAGUAGACGUAAACCG | 3111 |
| 26283 | GUGUUAAAAAUCUGAACUC | 1461 | 26283 | GUGUUAAAAAUCUGAACUC | 1461 | 26301 | GAGUUCAGAUUUUUAACAC | 3112 |
| 26301 | CUUCUGAAGGAGUUCCUGA | 1462 | 26301 | CUUCUGAAGGAGUUCCUGA | 1462 | 26319 | UCAGGAACUCCUUCAGAAG | 3113 |
| 26319 | AUCUUCUGGUCUAAACGAA | 1463 | 26319 | AUCUUCUGGUCUAAACGAA | 1463 | 26337 | UUCGUUUAGACCAGAAGAU | 3114 |
| 26337 | ACUAACUAUUAUUAUUAUU | 1464 | 26337 | ACUAACUAUUAUUAUUAUU | 1464 | 26355 | AAUAAUAAUAAUAGUUAGU | 3115 |
| 26355 | UCUGUUUGGAACUUUAACA | 1465 | 26355 | UCUGUUUGGAACUUUAACA | 1465 | 26373 | UGUUAAAGUUCCAAACAGA | 3116 |
| 26373 | AUUGCUUAUCAUGGCAGAC | 1466 | 26373 | AUUGCUUAUCAUGGCAGAC | 1466 | 26391 | GUCUGCCAUGAUAAGCAAU | 3117 |
| 26391 | CAACGGUACUAUUACCGUU | 1467 | 26391 | CAACGGUACUAUUACCGUU | 1467 | 26409 | AACGGUAAUAGUACCGUUG | 3118 |
| 26409 | UGAGGAGCUUAAACAACUC | 1468 | 26409 | UGAGGAGCUUAAACAACUC | 1468 | 26427 | GAGUUGUUUAAGCUCCUCA | 3119 |
| 26427 | CCUGGAACAAUGGAACCUA | 1469 | 26427 | CCUGGAACAAUGGAACCUA | 1469 | 26445 | UAGGUUCCAUUGUUCCAGG | 3120 |
| 26445 | AGUAAUAGGUUUCCUAUUC | 1470 | 26445 | AGUAAUAGGUUUCCUAUUC | 1470 | 26463 | GAAUAGGAAACCUAUUACU | 3121 |
| 26463 | CCUAGCCUGGAUUAUGUUA | 1471 | 26463 | CCUAGCCUGGAUUAUGUUA | 1471 | 26481 | UAACAUAAUCCAGGCUAGG | 3122 |
| 26481 | ACUACAAUUUGCCUAUUCU | 1472 | 26481 | ACUACAAUUUGCCUAUUCU | 1472 | 26499 | AGAAUAGGCAAAUUGUAGU | 3123 |
| 26499 | UAAUCGGAACAGGUUUUUG | 1473 | 26499 | UAAUCGGAACAGGUUUUUG | 1473 | 26517 | CAAAAACCUGUUCCGAUUA | 3124 |
| 26517 | GUACAUAAUAAAGCUUGUU | 1474 | 26517 | GUACAUAAUAAAGCUUGUU | 1474 | 26535 | AACAAGCUUUAUUAUGUAC | 3125 |
| 26535 | UUUCCUCUGGCUCUUGUGG | 1475 | 26535 | UUUCCUCUGGCUCUUGUGG | 1475 | 26553 | CCACAAGAGCCAGAGGAAA | 3126 |
| 26553 | GCCAGUAACACUUGCUUGU | 1476 | 26553 | GCCAGUAACACUUGCUUGU | 1476 | 26571 | ACAAGCAAGUGUUACUGGC | 3127 |
| 26571 | UUUUGUGCUUGCUGCUGUC | 1477 | 26571 | UUUUGUGCUUGCUGCUGUC | 1477 | 26589 | GACAGCAGCAAGCACAAAA | 3128 |
| 26589 | CUACAGAAUUAAUUGGGUG | 1478 | 26589 | CUACAGAAUUAAUUGGGUG | 1478 | 26607 | CACCCAAUUAAUUCUGUAG | 3129 |
| 26607 | GACUGGCGGGAUUGCGAUU | 1479 | 26607 | GACUGGCGGGAUUGCGAUU | 1479 | 26625 | AAUCGCAAUCCCGCCAGUC | 3130 |
| 26625 | UGCAAUGGCUUGUAUUGUA | 1480 | 26625 | UGCAAUGGCUUGUAUUGUA | 1480 | 26643 | UACAAUACAAGCCAUUGCA | 3131 |
| 26643 | AGGCUUGAUGUGGCUUAGC | 1481 | 26643 | AGGCUUGAUGUGGCUUAGC | 1481 | 26661 | GCUAAGCCACAUCAAGCCU | 3132 |
| 26661 | CUACUUCGUUGCUUCCUUC | 1482 | 26661 | CUACUUCGUUGCUUCCUUC | 1482 | 26679 | GAAGGAAGCAACGAAGUAG | 3133 |
| 26679 | CAGGCUGUUUGCUCGUACC | 1483 | 26679 | CAGGCUGUUUGCUCGUACC | 1483 | 26697 | GGUACGAGCAAACAGCCUG | 3134 |
| 26697 | CCGCUCAAUGUGGUCAUUC | 1484 | 26697 | CCGCUCAAUGUGGUCAUUC | 1484 | 26715 | GAAUGACCACAUUGAGCGG | 3135 |
| 26715 | CAACCCAGAAACAAACAUU | 1485 | 26715 | CAACCCAGAAACAAACAUU | 1485 | 26733 | AAUGUUUGUUUCUGGGUUG | 3136 |
| 26733 | UCUUCUCAAUGUGCCUCUC | 1486 | 26733 | UCUUCUCAAUGUGCCUCUC | 1486 | 26751 | GAGAGGCACAUUGAGAAGA | 3137 |
| 26751 | CCGGGGGACAAUUGUGACC | 1487 | 26751 | CCGGGGGACAAUUGUGACC | 1487 | 26769 | GGUCACAAUUGUCCCCCGG | 3138 |
| 26769 | CAGACCGCUCAUGGAAAGU | 1488 | 26769 | CAGACCGCUCAUGGAAAGU | 1488 | 26787 | ACUUUCCAUGAGCGGUCUG | 3139 |
| 26787 | UGAACUUGUCAUUGGUGCU | 1489 | 26787 | UGAACUUGUCAUUGGUGCU | 1489 | 26805 | AGCACCAAUGACAAGUUCA | 3140 |
| 26805 | UGUGAUCAUUCGUGGUCAC | 1490 | 26805 | UGUGAUCAUUCGUGGUCAC | 1490 | 26823 | GUGACCACGAAUGAUCACA | 3141 |
| 26823 | CUUGCGAAUGGCCGGACAC | 1491 | 26823 | CUUGCGAAUGGCCGGACAC | 1491 | 26841 | GUGUCCGGCCAUUCGCAAG | 3142 |
| 26841 | CUCCCUAGGGCGCUGUGAC | 1492 | 26841 | CUCCCUAGGGCGCUGUGAC | 1492 | 26859 | GUCACAGCGCCCUAGGGAG | 3143 |
| 26859 | CAUUAAGGACCUGCCAAAA | 1493 | 26859 | CAUUAAGGACCUGCCAAAA | 1493 | 26877 | UUUUGGCAGGUCCUUAAUG | 3144 |
| 26877 | AGAGAUCACUGUGGCUACA | 1494 | 26877 | AGAGAUCACUGUGGCUACA | 1494 | 26895 | UGUAGCCACAGUGAUCUCU | 3145 |
| 26895 | AUCACGAACGCUUUCUUAU | 1495 | 26895 | AUCACGAACGCUUUCUUAU | 1495 | 26913 | AUAAGAAAGCGUUCGUGAU | 3146 |
| 26913 | UUACAAAUUAGGAGCGUCG | 1496 | 26913 | UUACAAAUUAGGAGCGUCG | 1496 | 26931 | CGACGCUCCUAAUUUGUAA | 3147 |
| 26931 | GCAGCGUGUAGGCACUGAU | 1497 | 26931 | GCAGCGUGUAGGCACUGAU | 1497 | 26949 | AUCAGUGCCUACACGCUGC | 3148 |
| 26949 | UUCAGGUUUUGCUGCAUAC | 1498 | 26949 | UUCAGGUUUUGCUGCAUAC | 1498 | 26967 | GUAUGCAGCAAAACCUGAA | 3149 |
| 26967 | CAACCGCUACCGUAUUGGA | 1499 | 26967 | CAACCGCUACCGUAUUGGA | 1499 | 26985 | UCCAAUACGGUAGCGGUUG | 3150 |
| 26985 | AAACUAUAAAUUAAAUACA | 1500 | 26985 | AAACUAUAAAUUAAAUACA | 1500 | 27003 | UGUAUUUAAUUUAUAGUUU | 3151 |
| 27003 | AGACCACGCCGGUAGCAAC | 1501 | 27003 | AGACCACGCCGGUAGCAAC | 1501 | 27021 | GUUGCUACCGGCGUGGUCU | 3152 |
| 27021 | CGACAAUAUUGCUUUGCUA | 1502 | 27021 | CGACAAUAUUGCUUUGCUA | 1502 | 27039 | UAGCAAAGCAAUAUUGUCG | 3153 |
| 27039 | AGUACAGUAAGUGACAACA | 1503 | 27039 | AGUACAGUAAGUGACAACA | 1503 | 27057 | UGUUGUCACUUACUGUACU | 3154 |
| 27057 | AGAUGUUUCAUCUUGUUGA | 1504 | 27057 | AGAUGUUUCAUCUUGUUGA | 1504 | 27075 | UCAACAAGAUGAAACAUCU | 3155 |
| 27075 | ACUUCCAGGUUACAAUAGC | 1505 | 27075 | ACUUCCAGGUUACAAUAGC | 1505 | 27093 | GCUAUUGUAACCUGGAAGU | 3156 |
| 27093 | CAGAGAUAUUGAUUAUCAU | 1506 | 27093 | CAGAGAUAUUGAUUAUCAU | 1506 | 27111 | AUGAUAAUCAAUAUCUCUG | 3157 |
| 27111 | UUAUGAGGACUUUCAGGAU | 1507 | 27111 | UUAUGAGGACUUUCAGGAU | 1507 | 27129 | AUCCUGAAAGUCCUCAUAA | 3158 |
| 27129 | UUGCUAUUUGGAAUCUUGA | 1508 | 27129 | UUGCUAUUUGGAAUCUUGA | 1508 | 27147 | UCAAGAUUCCAAAUAGCAA | 3159 |
| 27147 | ACGUUAUAAUAAGUUCAAU | 1509 | 27147 | ACGUUAUAAUAAGUUCAAU | 1509 | 27165 | AUUGAACUUAUUAUAACGU | 3160 |
| 27165 | UAGUGAGACAAUUAUUUAA | 1510 | 27165 | UAGUGAGACAAUUAUUUAA | 1510 | 27183 | UUAAAUAAUUGUCUCACUA | 3161 |
| 27183 | AGCCUCUAACUAAGAAGAA | 1511 | 27183 | AGCCUCUAACUAAGAAGAA | 1511 | 27201 | UUCUUCUUAGUUAGAGGCU | 3162 |
| 27201 | AUUAUUCGGAGUUAGAUGA | 1512 | 27201 | AUUAUUCGGAGUUAGAUGA | 1512 | 27219 | UCAUCUAACUCCGAAUAAU | 3163 |
| 27219 | AUGAAGAACCUAUGGAGUU | 1513 | 27219 | AUGAAGAACCUAUGGAGUU | 1513 | 27237 | AACUCCAUAGGUUCUUCAU | 3164 |
| 27237 | UAGAUUAUCCAUAAAACGA | 1514 | 27237 | UAGAUUAUCCAUAAAACGA | 1514 | 27255 | UCGUUUUAUGGAUAAUCUA | 3165 |
| 27255 | AACAUGAAAAUUAUUCUCU | 1515 | 27255 | AACAUGAAAAUUAUUCUCU | 1515 | 27273 | AGAGAAUAAUUUUCAUGUU | 3166 |
| 27273 | UUCCUGACAUUGAUUGUAU | 1516 | 27273 | UUCCUGACAUUGAUUGUAU | 1516 | 27291 | AUACAAUCAAUGUCAGGAA | 3167 |
| 27291 | UUUACAUCUUGCGAGCUAU | 1517 | 27291 | UUUACAUCUUGCGAGCUAU | 1517 | 27309 | AUAGCUCGCAAGAUGUAAA | 3168 |
| 27309 | UAUCACUAUCAGGAGUGUG | 1518 | 27309 | UAUCACUAUCAGGAGUGUG | 1518 | 27327 | CACACUCCUGAUAGUGAUA | 3169 |
| 27327 | GUUAGAGGUACGACUGUAC | 1519 | 27327 | GUUAGAGGUACGACUGUAC | 1519 | 27345 | GUACAGUCGUACCUCUAAC | 3170 |
| 27345 | CUACUAAAAGAACCUUGCC | 1520 | 27345 | CUACUAAAAGAACCUUGCC | 1520 | 27363 | GGCAAGGUUCUUUUAGUAG | 3171 |
| 27363 | CCAUCAGGAACAUACGAGG | 1521 | 27363 | CCAUCAGGAACAUACGAGG | 1521 | 27381 | CCUCGUAUGUUCCUGAUGG | 3172 |
| 27381 | GGCAAUUCACCAUUUCACC | 1522 | 27381 | GGCAAUUCACCAUUUCACC | 1522 | 27399 | GGUGAAAUGGUGAAUUGCC | 3173 |
| 27399 | CCUCUUGCUGACAAUAAAU | 1523 | 27399 | CCUCUUGCUGACAAUAAAU | 1523 | 27417 | AUUUAUUGUCAGCAAGAGG | 3174 |
| 27417 | UUUGCACUAACUUGCACUA | 1524 | 27417 | UUUGCACUAACUUGCACUA | 1524 | 27435 | UAGUGCAAGUUAGUGCAAA | 3175 |
| 27435 | AGCACACACUUUGCUUUUG | 1525 | 27435 | AGCACACACUUUGCUUUUG | 1525 | 27453 | CAAAAGCAAAGUGUGUGCU | 3176 |
| 27453 | GCUUGUGCUGACGGUACUC | 1526 | 27453 | GCUUGUGCUGACGGUACUC | 1526 | 27471 | GAGUACCGUCAGCACAAGC | 3177 |
| 27471 | CGACAUACCUAUCAGCUGC | 1527 | 27471 | CGACAUACCUAUCAGCUGC | 1527 | 27489 | GCAGCUGAUAGGUAUGUCG | 3178 |
| 27489 | CGUGCAAGAUCAGUUUCAC | 1528 | 27489 | CGUGCAAGAUCAGUUUCAC | 1528 | 27507 | GUGAAACUGAUCUUGCACG | 3179 |
| 27507 | CCAAAACUUUUCAUCAGAC | 1529 | 27507 | CCAAAACUUUUCAUCAGAC | 1529 | 27525 | GUCUGAUGAAAAGUUUUGG | 3180 |
| 27525 | CAAGAGGAGGUUCAACAAG | 1530 | 27525 | CAAGAGGAGGUUCAACAAG | 1530 | 27543 | CUUGUUGAACCUCCUCUUG | 3181 |
| 27543 | GAGCUCUACUCGCCACUUU | 1531 | 27543 | GAGCUCUACUCGCCACUUU | 1531 | 27561 | AAAGUGGCGAGUAGAGCUC | 3182 |
| 27561 | UUUCUCAUUGUUGCUGCUC | 1532 | 27561 | UUUCUCAUUGUUGCUGCUC | 1532 | 27579 | GAGCAGCAACAAUGAGAAA | 3183 |
| 27579 | CUAGUAUUUUUAAUACUUU | 1533 | 27579 | CUAGUAUUUUUAAUACUUU | 1533 | 27597 | AAAGUAUUAAAAAUACUAG | 3184 |
| 27597 | UGCUUCACCAUUAAGAGAA | 1534 | 27597 | UGCUUCACCAUUAAGAGAA | 1534 | 27615 | UUCUCUUAAUGGUGAAGCA | 3185 |
| 27615 | AAGACAGAAUGAAUGAGCU | 1535 | 27615 | AAGACAGAAUGAAUGAGCU | 1535 | 27633 | AGCUCAUUCAUUCUGUCUU | 3186 |
| 27633 | UCACUUUAAUUGACUUCUA | 1536 | 27633 | UCACUUUAAUUGACUUCUA | 1536 | 27651 | UAGAAGUCAAUUAAAGUGA | 3187 |
| 27651 | AUUUGUGCUUUUUAGCCUU | 1537 | 27651 | AUUUGUGCUUUUUAGCCUU | 1537 | 27669 | AAGGCUAAAAAGCACAAAU | 3188 |
| 27669 | UUCUGCUAUUCCUUGUUUU | 1538 | 27669 | UUCUGCUAUUCCUUGUUUU | 1538 | 27687 | AAAACAAGGAAUAGCAGAA | 3189 |
| 27687 | UAAUAAUGCUUAUUAUAUU | 1539 | 27687 | UAAUAAUGCUUAUUAUAUU | 1539 | 27705 | AAUAUAAUAAGCAUUAUUA | 3190 |
| 27705 | UUUGGUUUUCACUCGAAAU | 1540 | 27705 | UUUGGUUUUCACUCGAAAU | 1540 | 27723 | AUUUCGAGUGAAAACCAAA | 3191 |
| 27723 | UCCAGGAUCUAGAAGAACC | 1541 | 27723 | UCCAGGAUCUAGAAGAACC | 1541 | 27741 | GGUUCUUCUAGAUCCUGGA | 3192 |
| 27741 | CUUGUACCAAAGUCUAAAC | 1542 | 27741 | CUUGUACCAAAGUCUAAAC | 1542 | 27759 | GUUUAGACUUUGGUACAAG | 3193 |
| 27759 | CGAACAUGAAACUUCUCAU | 1543 | 27759 | CGAACAUGAAACUUCUCAU | 1543 | 27777 | AUGAGAAGUUUCAUGUUCG | 3194 |
| 27777 | UUGUUUUGACUUGUAUUUC | 1544 | 27777 | UUGUUUUGACUUGUAUUUC | 1544 | 27795 | GAAAUACAAGUCAAAACAA | 3195 |
| 27795 | CUCUAUGCAGUUGCAUAUG | 1545 | 27795 | CUCUAUGCAGUUGCAUAUG | 1545 | 27813 | CAUAUGCAACUGCAUAGAG | 3196 |
| 27813 | GCACUGUAGUACAGCGCUG | 1546 | 27813 | GCACUGUAGUACAGCGCUG | 1546 | 27831 | CAGCGCUGUACUACAGUGC | 3197 |
| 27831 | GUGCAUCUAAUAAACCUCA | 1547 | 27831 | GUGCAUCUAAUAAACCUCA | 1547 | 27849 | UGAGGUUUAUUAGAUGCAC | 3198 |
| 27849 | AUGUGCUUGAAGAUCCUUG | 1548 | 27849 | AUGUGCUUGAAGAUCCUUG | 1548 | 27867 | CAAGGAUCUUCAAGCACAU | 3199 |
| 27867 | GUAAGGUACAACACUAGGG | 1549 | 27867 | GUAAGGUACAACACUAGGG | 1549 | 27885 | CCCUAGUGUUGUACCUUAC | 3200 |
| 27885 | GGUAAUACUUAUAGCACUG | 1550 | 27885 | GGUAAUACUUAUAGCACUG | 1550 | 27903 | CAGUGCUAUAAGUAUUACC | 3201 |
| 27903 | GCUUGGCUUUGUGCUCUAG | 1551 | 27903 | GCUUGGCUUUGUGCUCUAG | 1551 | 27921 | CUAGAGCACAAAGCCAAGC | 3202 |
| 27921 | GGAAAGGUUUUACCUUUUC | 1552 | 27921 | GGAAAGGUUUUACCUUUUC | 1552 | 27939 | GAAAAGGUAAAACCUUUCC | 3203 |
| 27939 | CAUAGAUGGCACACUAUGG | 1553 | 27939 | CAUAGAUGGCACACUAUGG | 1553 | 27957 | CCAUAGUGUGCCAUCUAUG | 3204 |
| 27957 | GUUCAAACAUGCACACCUA | 1554 | 27957 | GUUCAAACAUGCACACCUA | 1554 | 27975 | UAGGUGUGCAUGUUUGAAC | 3205 |
| 27975 | AAUGUUACUAUCAACUGUC | 1555 | 27975 | AAUGUUACUAUCAACUGUC | 1555 | 27993 | GACAGUUGAUAGUAACAUU | 3206 |
| 27993 | CAAGAUCCAGCUGGUGGUG | 1556 | 27993 | CAAGAUCCAGCUGGUGGUG | 1556 | 28011 | CACCACCAGCUGGAUCUUG | 3207 |
| 28011 | GCGCUUAUAGCUAGGUGUU | 1557 | 28011 | GCGCUUAUAGCUAGGUGUU | 1557 | 28029 | AACACCUAGCUAUAAGCGC | 3208 |
| 28029 | UGGUACCUUCAUGAAGGUC | 1558 | 28029 | UGGUACCUUCAUGAAGGUC | 1558 | 28047 | GACCUUCAUGAAGGUACCA | 3209 |
| 28047 | CACCAAACUGCUGCAUUUA | 1559 | 28047 | CACCAAACUGCUGCAUUUA | 1559 | 28065 | UAAAUGCAGCAGUUUGGUG | 3210 |
| 28065 | AGAGACGUACUUGUUGUUU | 1560 | 28065 | AGAGACGUACUUGUUGUUU | 1560 | 28083 | AAACAACAAGUACGUCUCU | 3211 |
| 28083 | UUAAAUAAACGAACAAAUU | 1561 | 28083 | UUAAAUAAACGAACAAAUU | 1561 | 28101 | AAUUUGUUCGUUUAUUUAA | 3212 |
| 28101 | UAAAAUGUCUGAUAAUGGA | 1562 | 28101 | UAAAAUGUCUGAUAAUGGA | 1562 | 28119 | UCCAUUAUCAGACAUUUUA | 3213 |
| 28119 | ACCCCAAUCAAACCAACGU | 1563 | 28119 | ACCCCAAUCAAACCAACGU | 1563 | 28137 | ACGUUGGUUUGAUUGGGGU | 3214 |
| 28137 | UAGUGCCCCCCGCAUUACA | 1564 | 28137 | UAGUGCCCCCCGCAUUACA | 1564 | 28155 | UGUAAUGCGGGGGGCACUA | 3215 |
| 28155 | AUUUGGUGGACCCACAGAU | 1565 | 28155 | AUUUGGUGGACCCACAGAU | 1565 | 28173 | AUCUGUGGGUCCACCAAAU | 3216 |
| 28173 | UUCAACUGACAAUAACCAG | 1566 | 28173 | UUCAACUGACAAUAACCAG | 1566 | 28191 | CUGGUUAUUGUCAGUUGAA | 3217 |
| 28191 | GAAUGGAGGACGCAAUGGG | 1567 | 28191 | GAAUGGAGGACGCAAUGGG | 1567 | 28209 | CCCAUUGCGUCCUCCAUUC | 3218 |
| 28209 | GGCAAGGCCAAAACAGCGC | 1568 | 28209 | GGCAAGGCCAAAACAGCGC | 1568 | 28227 | GCGCUGUUUUGGCCUUGCC | 3219 |
| 28227 | CCGACCCCAAGGUUUACCC | 1569 | 28227 | CCGACCCCAAGGUUUACCC | 1569 | 28245 | GGGUAAACCUUGGGGUCGG | 3220 |
| 28245 | CAAUAAUACUGCGUCUUGG | 1570 | 28245 | CAAUAAUACUGCGUCUUGG | 1570 | 28263 | CCAAGACGCAGUAUUAUUG | 3221 |
| 28263 | GUUCACAGCUCUCACUCAG | 1571 | 28263 | GUUCACAGCUCUCACUCAG | 1571 | 28281 | CUGAGUGAGAGCUGUGAAC | 3222 |
| 28281 | GCAUGGCAAGGAGGAACUU | 1572 | 28281 | GCAUGGCAAGGAGGAACUU | 1572 | 28299 | AAGUUCCUCCUUGCCAUGC | 3223 |
| 28299 | UAGAUUCCCUCGAGGCCAG | 1573 | 28299 | UAGAUUCCCUCGAGGCCAG | 1573 | 28317 | CUGGCCUCGAGGGAAUCUA | 3224 |
| 28317 | GGGCGUUCCAAUCAACACC | 1574 | 28317 | GGGCGUUCCAAUCAACACC | 1574 | 28335 | GGUGUUGAUUGGAACGCCC | 3225 |
| 28335 | CAAUAGUGGUCCAGAUGAC | 1575 | 28335 | CAAUAGUGGUCCAGAUGAC | 1575 | 28353 | GUCAUCUGGACCACUAUUG | 3226 |
| 28353 | CCAAAUUGGCUACUACCGA | 1576 | 28353 | CCAAAUUGGCUACUACCGA | 1576 | 28371 | UCGGUAGUAGCCAAUUUGG | 3227 |
| 28371 | AAGAGCUACCCGACGAGUU | 1577 | 28371 | AAGAGCUACCCGACGAGUU | 1577 | 28389 | AACUCGUCGGGUAGCUCUU | 3228 |
| 28389 | UCGUGGUGGUGACGGCAAA | 1578 | 28389 | UCGUGGUGGUGACGGCAAA | 1578 | 28407 | UUUGCCGUCACCACCACGA | 3229 |
| 28407 | AAUGAAAGAGCUCAGCCCC | 1579 | 28407 | AAUGAAAGAGCUCAGCCCC | 1579 | 28425 | GGGGCUGAGCUCUUUCAUU | 3230 |
| 28425 | CAGAUGGUACUUCUAUUAC | 1580 | 28425 | CAGAUGGUACUUCUAUUAC | 1580 | 28443 | GUAAUAGAAGUACCAUCUG | 3231 |
| 28443 | CCUAGGAACUGGCCCAGAA | 1581 | 28443 | CCUAGGAACUGGCCCAGAA | 1581 | 28461 | UUCUGGGCCAGUUCCUAGG | 3232 |
| 28461 | AGCUUCACUUCCCUACGGC | 1582 | 28461 | AGCUUCACUUCCCUACGGC | 1582 | 28479 | GCCGUAGGGAAGUGAAGCU | 3233 |
| 28479 | CGCUAACAAAGAAGGCAUC | 1583 | 28479 | CGCUAACAAAGAAGGCAUC | 1583 | 28497 | GAUGCCUUCUUUGUUAGCG | 3234 |
| 28497 | CGUAUGGGUUGCAACUGAG | 1584 | 28497 | CGUAUGGGUUGCAACUGAG | 1584 | 28515 | CUCAGUUGCAACCCAUACG | 3235 |
| 28515 | GGGAGCCUUGAAUACACCC | 1585 | 28515 | GGGAGCCUUGAAUACACCC | 1585 | 28533 | GGGUGUAUUCAAGGCUCCC | 3236 |
| 28533 | CAAAGACCACAUUGGCACC | 1586 | 28533 | CAAAGACCACAUUGGCACC | 1586 | 28551 | GGUGCCAAUGUGGUCUUUG | 3237 |
| 28551 | CCGCAAUCCUAAUAACAAU | 1587 | 28551 | CCGCAAUCCUAAUAACAAU | 1587 | 28569 | AUUGUUAUUAGGAUUGCGG | 3238 |
| 28569 | UGCUGCCACCGUGCUACAA | 1588 | 28569 | UGCUGCCACCGUGCUACAA | 1588 | 28587 | UUGUAGCACGGUGGCAGCA | 3239 |
| 28587 | ACUUCCUCAAGGAACAACA | 1589 | 28587 | ACUUCCUCAAGGAACAACA | 1589 | 28605 | UGUUGUUCCUUGAGGAAGU | 3240 |
| 28605 | AUUGCCAAAAGGCUUCUAC | 1590 | 28605 | AUUGCCAAAAGGCUUCUAC | 1590 | 28623 | GUAGAAGCCUUUUGGCAAU | 3241 |
| 28623 | CGCAGAGGGAAGCAGAGGC | 1591 | 28623 | CGCAGAGGGAAGCAGAGGC | 1591 | 28641 | GCCUCUGCUUCCCUCUGCG | 3242 |
| 28641 | CGGCAGUCAAGCCUCUUCU | 1592 | 28641 | CGGCAGUCAAGCCUCUUCU | 1592 | 28659 | AGAAGAGGCUUGACUGCCG | 3243 |
| 28659 | UCGCUCCUCAUCACGUAGU | 1593 | 28659 | UCGCUCCUCAUCACGUAGU | 1593 | 28677 | ACUACGUGAUGAGGAGCGA | 3244 |
| 28677 | UCGCGGUAAUUCAAGAAAU | 1594 | 28677 | UCGCGGUAAUUCAAGAAAU | 1594 | 28695 | AUUUCUUGAAUUACCGCGA | 3245 |
| 28695 | UUCAACUCCUGGCAGCAGU | 1595 | 28695 | UUCAACUCCUGGCAGCAGU | 1595 | 28713 | ACUGCUGCCAGGAGUUGAA | 3246 |
| 28713 | UAGGGGAAAUUCUCCUGCU | 1596 | 28713 | UAGGGGAAAUUCUCCUGCU | 1596 | 28731 | AGCAGGAGAAUUUCCCCUA | 3247 |
| 28731 | UCGAAUGGCUAGCGGAGGU | 1597 | 28731 | UCGAAUGGCUAGCGGAGGU | 1597 | 28749 | ACCUCCGCUAGCCAUUCGA | 3248 |
| 28749 | UGGUGAAACUGCCCUCGCG | 1598 | 28749 | UGGUGAAACUGCCCUCGCG | 1598 | 28767 | CGCGAGGGCAGUUUCACCA | 3249 |
| 28767 | GCUAUUGCUGCUAGACAGA | 1599 | 28767 | GCUAUUGCUGCUAGACAGA | 1599 | 28785 | UCUGUCUAGCAGCAAUAGC | 3250 |
| 28785 | AUUGAACCAGCUUGAGAGC | 1600 | 28785 | AUUGAACCAGCUUGAGAGC | 1600 | 28803 | GCUCUCAAGCUGGUUCAAU | 3251 |
| 28803 | CAAAGUUUCUGGUAAAGGC | 1601 | 28803 | CAAAGUUUCUGGUAAAGGC | 1601 | 28821 | GCCUUUACCAGAAACUUUG | 3252 |
| 28821 | CCAACAACAACAAGGCCAA | 1602 | 28821 | CCAACAACAACAAGGCCAA | 1602 | 28839 | UUGGCCUUGUUGUUGUUGG | 3253 |
| 28839 | AACUGUCACUAAGAAAUCU | 1603 | 28839 | AACUGUCACUAAGAAAUCU | 1603 | 28857 | AGAUUUCUUAGUGACAGUU | 3254 |
| 28857 | UGCUGCUGAGGCAUCUAAA | 1604 | 28857 | UGCUGCUGAGGCAUCUAAA | 1604 | 28875 | UUUAGAUGCCUCAGCAGCA | 3255 |
| 28875 | AAAGCCUCGCCAAAAACGU | 1605 | 28875 | AAAGCCUCGCCAAAAACGU | 1605 | 28893 | ACGUUUUUGGCGAGGCUUU | 3256 |
| 28893 | UACUGCCACAAAACAGUAC | 1606 | 28893 | UACUGCCACAAAACAGUAC | 1606 | 28911 | GUACUGUUUUGUGGCAGUA | 3257 |
| 28911 | CAACGUCACUCAAGCAUUU | 1607 | 28911 | CAACGUCACUCAAGCAUUU | 1607 | 28929 | AAAUGCUUGAGUGACGUUG | 3258 |
| 28929 | UGGGAGACGUGGUCCAGAA | 1608 | 28929 | UGGGAGACGUGGUCCAGAA | 1608 | 28947 | UUCUGGACCACGUCUCCCA | 3259 |
| 28947 | ACAAACCCAAGGAAAUUUC | 1609 | 28947 | ACAAACCCAAGGAAAUUUC | 1609 | 28965 | GAAAUUUCCUUGGGUUUGU | 3260 |
| 28965 | CGGGGACCAAGACCUAAUC | 1610 | 28965 | CGGGGACCAAGACCUAAUC | 1610 | 28983 | GAUUAGGUCUUGGUCCCCG | 3261 |
| 28983 | CAGACAAGGAACUGAUUAC | 1611 | 28983 | CAGACAAGGAACUGAUUAC | 1611 | 29001 | GUAAUCAGUUCCUUGUCUG | 3262 |
| 29001 | CAAACAUUGGCCGCAAAUU | 1612 | 29001 | CAAACAUUGGCCGCAAAUU | 1612 | 29019 | AAUUUGCGGCCAAUGUUUG | 3263 |
| 29019 | UGCACAAUUUGCUCCAAGU | 1613 | 29019 | UGCACAAUUUGCUCCAAGU | 1613 | 29037 | ACUUGGAGCAAAUUGUGCA | 3264 |
| 29037 | UGCCUCUGCAUUCUUUGGA | 1614 | 29037 | UGCCUCUGCAUUCUUUGGA | 1614 | 29055 | UCCAAAGAAUGCAGAGGCA | 3265 |
| 29055 | AAUGUCACGCAUUGGCAUG | 1615 | 29055 | AAUGUCACGCAUUGGCAUG | 1615 | 29073 | CAUGCCAAUGCGUGACAUU | 3266 |
| 29073 | GGAAGUCACACCUUCGGGA | 1616 | 29073 | GGAAGUCACACCUUCGGGA | 1616 | 29091 | UCCCGAAGGUGUGACUUCC | 3267 |
| 29091 | AACAUGGCUGACUUAUCAU | 1617 | 29091 | AACAUGGCUGACUUAUCAU | 1617 | 29109 | AUGAUAAGUCAGCCAUGUU | 3268 |
| 29109 | UGGAGCCAUUAAAUUGGAU | 1618 | 29109 | UGGAGCCAUUAAAUUGGAU | 1618 | 29127 | AUCCAAUUUAAUGGCUCCA | 3269 |
| 29127 | UGACAAAGAUCCACAAUUC | 1619 | 29127 | UGACAAAGAUCCACAAUUC | 1619 | 29145 | GAAUUGUGGAUCUUUGUCA | 3270 |
| 29145 | CAAAGACAACGUCAUACUG | 1620 | 29145 | CAAAGACAACGUCAUACUG | 1620 | 29163 | CAGUAUGACGUUGUCUUUG | 3271 |
| 29163 | GCUGAACAAGCACAUUGAC | 1621 | 29163 | GCUGAACAAGCACAUUGAC | 1621 | 29181 | GUCAAUGUGCUUGUUCAGC | 3272 |
| 29181 | CGCAUACAAAACAUUCCCA | 1622 | 29181 | CGCAUACAAAACAUUCCCA | 1622 | 29199 | UGGGAAUGUUUUGUAUGCG | 3273 |
| 29199 | ACCAACAGAGCCUAAAAAG | 1623 | 29199 | ACCAACAGAGCCUAAAAAG | 1623 | 29217 | CUUUUUAGGCUCUGUUGGU | 3274 |
| 29217 | GGACAAAAAGAAAAAGACU | 1624 | 29217 | GGACAAAAAGAAAAAGACU | 1624 | 29235 | AGUCUUUUUCUUUUUGUCC | 3275 |
| 29235 | UGAUGAAGCUCAGCCUUUG | 1625 | 29235 | UGAUGAAGCUCAGCCUUUG | 1625 | 29253 | CAAAGGCUGAGCUUCAUCA | 3276 |
| 29253 | GCCGCAGAGACAAAAGAAG | 1626 | 29253 | GCCGCAGAGACAAAAGAAG | 1626 | 29271 | CUUCUUUUGUCUCUGCGGC | 3277 |
| 29271 | GCAGCCCACUGUGACUCUU | 1627 | 29271 | GCAGCCCACUGUGACUCUU | 1627 | 29289 | AAGAGUCACAGUGGGCUGC | 3278 |
| 29289 | UCUUCCUGCGGCUGACAUG | 1628 | 29289 | UCUUCCUGCGGCUGACAUG | 1628 | 29307 | CAUGUCAGCCGCAGGAAGA | 3279 |
| 29307 | GGAUGAUUUCUCCAGACAA | 1629 | 29307 | GGAUGAUUUCUCCAGACAA | 1629 | 29325 | UUGUCUGGAGAAAUCAUCC | 3280 |
| 29325 | ACUUCAAAAUUCCAUGAGU | 1630 | 29325 | ACUUCAAAAUUCCAUGAGU | 1630 | 29343 | ACUCAUGGAAUUUUGAAGU | 3281 |
| 29343 | UGGAGCUUCUGCUGAUUCA | 1631 | 29343 | UGGAGCUUCUGCUGAUUCA | 1631 | 29361 | UGAAUCAGCAGAAGCUCCA | 3282 |
| 29361 | AACUCAGGCAUAAACACUC | 1632 | 29361 | AACUCAGGCAUAAACACUC | 1632 | 29379 | GAGUGUUUAUGCCUGAGUU | 3283 |
| 29379 | CAUGAUGACCACACAAGGC | 1633 | 29379 | CAUGAUGACCACACAAGGC | 1633 | 29397 | GCCUUGUGUGGUCAUCAUG | 3284 |
| 29397 | CAGAUGGGCUAUGUAAACG | 1634 | 29397 | CAGAUGGGCUAUGUAAACG | 1634 | 29415 | CGUUUACAUAGCCCAUCUG | 3285 |
| 29415 | GUUUUCGCAAUUCCGUUUA | 1635 | 29415 | GUUUUCGCAAUUCCGUUUA | 1635 | 29433 | UAAACGGAAUUGCGAAAAC | 3286 |
| 29433 | ACGAUACAUAGUCUACUCU | 1636 | 29433 | ACGAUACAUAGUCUACUCU | 1636 | 29451 | AGAGUAGACUAUGUAUCGU | 3287 |
| 29451 | UUGUGCAGAAUGAAUUCUC | 1637 | 29451 | UUGUGCAGAAUGAAUUCUC | 1637 | 29469 | GAGAAUUCAUUCUGCACAA | 3288 |
| 29469 | CGUAACUAAACAGCACAAG | 1638 | 29469 | CGUAACUAAACAGCACAAG | 1638 | 29487 | CUUGUGCUGUUUAGUUACG | 3289 |
| 29487 | GUAGGUUUAGUUAACUUUA | 1639 | 29487 | GUAGGUUUAGUUAACUUUA | 1639 | 29505 | UAAAGUUAACUAAACCUAC | 3290 |
| 29505 | AAUCUCACAUAGCAAUCUU | 1640 | 29505 | AAUCUCACAUAGCAAUCUU | 1640 | 29523 | AAGAUUGCUAUGUGAGAUU | 3291 |
| 29523 | UUAAUCAAUGUGUAACAUU | 1641 | 29523 | UUAAUCAAUGUGUAACAUU | 1641 | 29541 | AAUGUUACACAUUGAUUAA | 3292 |
| 29541 | UAGGGAGGACUUGAAAGAG | 1642 | 29541 | UAGGGAGGACUUGAAAGAG | 1642 | 29559 | CUCUUUCAAGUCCUCCCUA | 3293 |
| 29559 | GCCACCACAUUUUCAUCGA | 1643 | 29559 | GCCACCACAUUUUCAUCGA | 1643 | 29577 | UCGAUGAAAAUGUGGUGGC | 3294 |
| 29577 | AGGCCACGCGGAGUACGAU | 1644 | 29577 | AGGCCACGCGGAGUACGAU | 1644 | 29595 | AUCGUACUCCGCGUGGCCU | 3295 |
| 29595 | UCGAGGGUACAGUGAAUAA | 1645 | 29595 | UCGAGGGUACAGUGAAUAA | 1645 | 29613 | UUAUUCACUGUACCCUCGA | 3296 |
| 29613 | AUGCUAGGGAGAGCUGCCU | 1646 | 29613 | AUGCUAGGGAGAGCUGCCU | 1646 | 29631 | AGGCAGCUCUCCCUAGCAU | 3297 |
| 29631 | UAUAUGGAAGAGCCCUAAU | 1647 | 29631 | UAUAUGGAAGAGCCCUAAU | 1647 | 29649 | AUUAGGGCUCUUCCAUAUA | 3298 |
| 29649 | UGUGUAAAAUUAAUUUUAG | 1648 | 29649 | UGUGUAAAAUUAAUUUUAG | 1648 | 29667 | CUAAAAUUAAUUUUACACA | 3299 |
| 29667 | GUAGUGCUAUCCCCAUGUG | 1649 | 29667 | GUAGUGCUAUCCCCAUGUG | 1649 | 29685 | CACAUGGGGAUAGCACUAC | 3300 |
| 29685 | GAUUUUAAUAGCUUCUUAG | 1650 | 29685 | GAUUUUAAUAGCUUCUUAG | 1650 | 29703 | CUAAGAAGCUAUUAAAAUC | 3301 |
| 29703 | GGAGAAUGACAAAAAAAAA | 1651 | 29703 | GGAGAAUGACAAAAAAAAA | 1651 | 29721 | UUUUUUUUUGUCAUUCUCC | 3302 |
| The 3′-ends of the Upper sequence and the Lower sequence of the siNA construct can include an overhang sequence, for example about 1, 2, 3, or 4 nucleotides in length, preferably 2 nucleotides in length, wherein the overhanging sequence of the lower sequence is optionally complementary to a portion of the target sequence. The overhang can comprise the general structure B, BNN, NN, BNsN, or NsN, where B stands for any terminal cap moiety, N stands for any nucleotide (e.g., thymidine) | | | | | | | | |
| # and s stands for phosphorothioate or other internucleotide linkage as described herein (e.g. internucleotide linkage having Formula I). The upper sequence is also referred to as the sense strand, whereas the lower sequence is also referred to as the antisense strand. The upper and lower sequences in the Table can further comprise a chemical modification having Formulae I-VII or any combination thereof (see for example chemical modifications as shown in Table V herein). | | | | | | | | |

[0414] TABLE III

SARS synthetic siNA and Target Sequences

| | | | |
|---|---|---|---|
| Target | Seq | RPI | Seq |

| | | | | | | |
|---|---|---|---|---|---|---|
| Pos | Target | ID | # | Aliases | Sequence | ID |

| | | | | | |
|---|---|---|---|---|---|
| 1655 | UGAAUGAAGAGGUUGCCAUCAUU | 3303 | SARS:1657U21 siRNA sense | AAUGAAGAGGUUGCCAUCATT | 3311 |
| 1164 | UGUUGCAUCUCCACAGGAGUGUA | 3304 | SARS:1166U21 siRNA sense | UUGCAUCUCCACAGGAGUGTT | 3312 |
| 2381 | CUCAAAGCAAGGGACUUUACCGU | 3305 | SARS:2383U21 siRNA sense | CAAAGCAAGGGACUUUACCTT | 3313 |
| 2598 | CUGUGUAAAUGGCCUCAUGCUCU | 3306 | SARS:2600U21 siRNA sense | GUGUAAAUGGCCUCAUGCUTT | 3314 |
| 26572 | UUUGUGCUUGCUGCUGUCUACAG | 3307 | SARS:26574U21 siRNA sense | UGUGCUUGCUGCUGUCUACTT | 3315 |
| 26790 | ACUUGUCAUUGGUGCUGUGAUCA | 3308 | SARS:26792U21 siRNA sense | UUGUCAUUGGUGCUGUGAUTT | 3316 |
| 28786 | UUGAACCAGCUUGAGAGCAAAGU | 3309 | SARS:28788U21 siRNA sense | GAACCAGCUUGAGAGCAAATT | 3317 |
| 26529 | GCUUGUUUUCCUCUGGCUCUUGU | 3310 | SARS:26531U21 siRNA sense | UUGUUUUCCUCUGGCUCUUTT | 3318 |
| 1655 | UGAAUGAAGAGGUUGCCAUCAUU | 3303 | SARS:1675L21 siRNA (1657C) | UGAUGGCAACCUCUUCAUUTT | 3319 |
| | | | antisense | | |
| 1164 | UGUUGCAUCUCCACAGGAGUGUA | 3304 | SARS:1184L21 siRNA (1166C) | CACUCCUGUGGAGAUGCAATT | 3320 |
| | | | antisense | | |
| 2381 | CUCAAAGCAAGGGACUUUACCGU | 3305 | SARS:2401L21 siRNA (2383C) | GGUAAAGUCCCUUGCUUUGTT | 3321 |
| | | | antisense | | |
| 2598 | CUGUGUAAAUGGCCUCAUGCUCU | 3306 | SARS:2618L21 siRNA (2600C) | AGCAUGAGGCCAUUUACACTT | 3322 |
| | | | antisense | | |
| 26572 | UUUGUGCUUGCUGCUGUCUACAG | 3307 | SARS:26592L21 siRNA (26574C) | GUAGACAGCAGCAAGCACATT | 3323 |
| | | | antisense | | |
| 26790 | ACUUGUCAUUGGUGCUGUGAUCA | 3308 | SARS:26810L21 siRNA (26792C) | AUCACAGCACCAAUGACAATT | 3324 |
| | | | antisense | | |
| 28786 | UUGAACCAGCUUGAGAGCAAAGU | 3309 | SARS:28806L21 siRNA (28788C) | UUUGCUCUCAAGCUGGUUCTT | 3325 |
| | | | antisense | | |
| 26529 | GCUUGUUUUCCUCUGGCUCUUGU | 3310 | SARS:26549L21 siRNA (26531C) | AAGAGCCAGAGGAAAACAATT | 3326 |
| | | | antisense | | |
| 1655 | UGAAUGAAGAGGUUGCCAUCAUU | 3303 | SARS:1657U21 siRNA stab04 sense | B AAuGAAGAGGuuGccAucATT B | 3327 |
| 1164 | UGUUGCAUCUCCACAGGAGUGUA | 3304 | SARS:1166U21 siRNA stab04 sense | B uuGcAucuccAcAGGAGuGTT B | 3328 |
| 2381 | CUCAAAGCAAGGGACUUUACCGU | 3305 | SARS:2383U21 siRNA stab04 sense | B cAAAGcAAGGGAcuuuAccTT B | 3329 |
| 2598 | CUGUGUAAAUGGCCUCAUGCUCU | 3306 | SARS:2600U21 siRNA stab04 sense | B GuGuAAAuGGccucAuGcuTT B | 3330 |
| 26572 | UUUGUGCUUGCUGCUGUCUACAG | 3307 | SARS:26574U21 siRNA stab04 sense | B uGuGcuuGcuGcuGucuAcTT B | 3331 |
| 26790 | ACUUGUCAUUGGUGCUGUGAUCA | 3308 | SARS:26792U21 siRNA stab04 sense | B uuGucAuuGGuGcuGuGAuTT B | 3332 |
| 28786 | UUGAACCAGCUUGAGAGCAAAGU | 3309 | SARS:28788U21 siRNA stab04 sense | B GAAccAGcuuGAGAGcAAATT B | 3333 |
| 26529 | GCUUGUUUUCCUCUGGCUCUUGU | 3310 | SARS:26531U21 siRNA stab04 sense | B uuGuuuuccucuGGcucuuTT B | 3334 |
| 1655 | UGAAUGAAGAGGUUGCCAUCAUU | 3303 | SARS:1675L21 siRNA (1657C) | uGAuGGcAAccucuucAuuTsT | 3335 |
| | | | stab05 antisense | | |
| 1164 | UGUUGCAUCUCCACAGGAGUGUA | 3304 | SARS:1184L21 siRNA (1166C) | cAcuccuGuGGAGAuGcAATsT | 3336 |
| | | | stab05 antisense | | |
| 2381 | CUCAAAGCAAGGGACUUUACCGU | 3305 | SARS:2401L21 siRNA (2383C) | GGuAAAGucccuuGcuuuGTsT | 3337 |
| | | | stab05 antisense | | |
| 2598 | CUGUGUAAAUGGCCUCAUGCUCU | 3306 | SARS:2618L21 siRNA (2600C) | AGcAuGAGGccAuuuAcAcTsT | 3338 |
| | | | stab05 antisense | | |
| 26572 | UUUGUGCUUGCUGCUGUCUACAG | 3307 | SARS:26592L21 siRNA (26574C) | GuAGAcAGcAGcAAGcAcATsT | 3339 |
| | | | stab05 antisense | | |
| 26790 | ACUUGUCAUUGGUGCUGUGAUCA | 3308 | SARS:26810L21 siRNA (26792C) | AucAcAGcAccAAuGAcAATsT | 3340 |
| | | | stab05 antisense | | |
| 28786 | UUGAACCAGCUUGAGAGCAAAGU | 3309 | SARS:28806L21 siRNA (28788C) | uuuGcucucAAGcuGGuucTsT | 3341 |
| | | | stab05 antisense | | |
| 26529 | GCUUGUUUUCCUCUGGCUCUUGU | 3310 | SARS:26549L21 siRNA (26531C) | AAGAGccAGAGGAAAAcAATsT | 3342 |
| | | | stab05 antisense | | |
| 1655 | UGAAUGAAGAGGUUGCCAUCAUU | 3303 | SARS:1657U21 siRNA stab07 sense | B AAuGAAGAGGuuGccAucATT B | 3343 |
| 1164 | UGUUGCAUCUCCACAGGAGUGUA | 3304 | SARS:1166U21 siRNA stab07 sense | B uuGcAucuccAcAGGAGuGTT B | 3344 |
| 2381 | CUCAAAGCAAGGGACUUUACCGU | 3305 | SARS:2383U21 siRNA stab07 sense | B cAAAGcAAGGGAcuuuAccTT B | 3345 |
| 2598 | CUGUGUAAAUGGCCUCAUGCUCU | 3306 | SARS:2600U21 siRNA stab07 sense | B GuGuAAAuGGccucAuGcuTT B | 3346 |
| 26572 | UUUGUGCUUGCUGCUGUCUACAG | 3307 | SARS:26574U21 siRNA stab07 sense | B uGuGcuuGcuGcuGucuAcTT B | 3347 |
| 26790 | ACUUGUCAUUGGUGCUGUGAUCA | 3308 | SARS:26792U21 siRNA stab07 sense | B uuGucAuuGGuGcuGuGAuTT B | 3348 |
| 28786 | UUGAACCAGCUUGAGAGCAAAGU | 3309 | SARS:28788U21 siRNA stab07 sense | B GAAccAGcuuGAGAGcAAATT B | 3349 |
| 26529 | GCUUGUUUUCCUCUGGCUCUUGU | 3310 | SARS:26531U21 siRNA stab07 sense | B uuGuuuuccucuGGcucuuTT B | 3350 |
| 1655 | UGAAUGAAGAGGUUGCCAUCAUU | 3303 | SARS:1675L21 siRNA (1657C) | uGAuGGcAAccucuucAuuTsT | 3351 |
| | | | stab11 antisense | | |
| 1164 | UGUUGCAUCUCCACAGGAGUGUA | 3304 | SARS:1184L21 siRNA (1166C) | cAcuccuGuGGAGAuGcAATsT | 3352 |
| | | | stab11 antisense | | |
| 2381 | CUCAAAGCAAGGGACUUUACCGU | 3305 | SARS:2401L21 siRNA (2383C) | GGuAAAGucccuuGcuuuGTsT | 3353 |
| | | | stab11 antisense | | |
| 2598 | CUGUGUAAAUGGCCUCAUGCUCU | 3306 | SARS:2618L21 siRNA (2600C) | AGcAuGAGGccAuuuAcAcTsT | 3354 |
| | | | stab11 antisense | | |
| 26572 | UUUGUGCUUGCUGCUGUCUACAG | 3307 | SARS:26592L21 siRNA (26574C) | GuAGAcAGcAGcAAGcAcATsT | 3355 |
| | | | stab11 antisense | | |
| 26790 | ACUUGUCAUUGGUGCUGUGAUCA | 3308 | SARS:26810L21 siRNA (26792C) | AucAcAGcAccAAuGAcAATsT | 3356 |
| | | | stab11 antisense | | |
| 28786 | UUGAACCAGCUUGAGAGCAAAGU | 3309 | SARS:28806L21 siRNA (28788C) | uuuGcucucAAGcuGGuucTsT | 3357 |
| | | | stab11 antisense | | |
| 26529 | GCUUGUUUUCCUCUGGCUCUUGU | 3310 | SARS:26549L21 siRNA (26531C) | AAGAGccAGAGGAAAAcAATsT | 3358 |
| | | | stab11 antisense | | |
| 1655 | UGAAUGAAGAGGUUGCCAUCAUU | 3303 | SARS:1657U21 siRNA stab08 sense | AAuGAAGAGGuuGccAucATsT | 3359 |
| 1164 | UGUUGCAUCUCCACAGGAGUGUA | 3304 | SARS:1166U21 siRNA stab08 sense | uuGcAucuccAcAGGAGuGTsT | 3360 |
| 2381 | CUCAAAGCAAGGGACUUUACCGU | 3305 | SARS:2383U21 siRNA stab08 sense | cAAAGcAAGGGAcuuuAccTsT | 3361 |
| 2598 | CUGUGUAAAUGGCCUCAUGCUCU | 3306 | SARS:2600U21 siRNA stab08 sense | GuGuAAAuGGccucAuGcuTsT | 3362 |
| 26572 | UUUGUGCUUGCUGCUGUCUACAG | 3307 | SARS:26574U21 siRNA stab08 sense | uGuGcuuGcuGcuGucuAcTsT | 3363 |
| 26790 | ACUUGUCAUUGGUGCUGUGAUCA | 3308 | SARS:26792U21 siRNA stab08 sense | uuGucAuuGGuGcuGuGAuTsT | 3364 |
| 28786 | UUGAACCAGCUUGAGAGCAAAGU | 3309 | SARS:28788U21 siRNA stab08 sense | GAAccAGcuuGAGAGcAAATsT | 3365 |
| 26529 | GCUUGUUUUCCUCUGGCUCUUGU | 3310 | SARS:26531U21 siRNA stab08 sense | uuGuuuuccucuGGcucuuTsT | 3366 |
| 1655 | UGAAUGAAGAGGUUGCCAUCAUU | 3303 | SARS:1675L21 siRNA (1657C) | uGAuGGcAAccucuucAuuTsT | 3367 |
| | | | stab08 antisense | | |
| 1164 | UGUUGCAUCUCCACAGGAGUGUA | 3304 | SARS:1184L21 siRNA (1166C) | cAcuccuGuGGAGAuGcAATsT | 3368 |
| | | | stab08 antisense | | |
| 2381 | CUCAAAGCAAGGGACUUUACCGU | 3305 | SARS:2401L21 siRNA (2383C) | GGuAAAGucccuuGcuuuGTsT | 3369 |
| | | | stab08 antisense | | |
| 2598 | CUGUGUAAAUGGCCUCAUGCUCU | 3306 | SARS:2618L21 siRNA (2600C) | AGcAuGAGGccAuuuAcAcTsT | 3370 |
| | | | stab08 antisense | | |
| 26572 | UUUGUGCUUGCUGCUGUCUACAG | 3307 | SARS:26592L21 siRNA (26574C) | GuAGAcAGcAGcAAGcAcATsT | 3371 |
| | | | stab08 antisense | | |
| 26790 | ACUUGUCAUUGGUGCUGUGAUCA | 3308 | SARS:26810L21 siRNA (26792C) | AucAcAGcAccAAuGAcAATsT | 3372 |
| | | | stab08 antisense | | |
| 28786 | UUGAACCAGCUUGAGAGCAAAGU | 3309 | SARS:28806L21 siRNA (28788C) | uuuGcucucAAGcuGGuucTsT | 3373 |
| | | | stab08 antisense | | |
| 26529 | GCUUGUUUUCCUCUGGCUCUUGU | 3310 | SARS:26549L21 siRNA (26531C) | AAGAGccAGAGGAAAAcAATsT | 3374 |
| | | | stab08 antisense | | |

Uppercase = ribonucleotide
u,c = 2′-deoxy-2′-fluoro U, C
A = 2′-O-methyl Adenosine
G = 2′-O-methyl Guanosine
T = thymidine
B = inverted deoxy abasic
s = phosphorothioate linkage
A = deoxy Adenosine
G = deoxy Guanosine

[0415] TABLE IV
Non-limiting examples of Stabilization Chemistries for chemically
modified siNA constructs

| Chemistry | pyrimidine | Purine | cap | p = S | Strand |
|---|---|---|---|---|---|
| “Stab 00” | Ribo | Ribo | TT at | | S/AS |
| | | | 3′-ends | | |
| “Stab 1” | Ribo | Ribo | — | 5 at 5′-end | S/AS |
| | | | | 1 at 3′-end | |
| “Stab 2” | Ribo | Ribo | — | All | Usually AS |
| | | | | linkages | |
| “Stab 3” | 2′-fluoro | Ribo | — | 4 at 5′-end | Usually S |
| | | | | 4 at 3′-end | |
| “Stab 4” | 2′-fluoro | Ribo | 5′ and | — | Usually S |
| | | | 3′-ends | | |
| “Stab 5” | 2′-fluoro | Ribo | — | 1 at 3′-end | Usually AS |
| “Stab 6” | 2′-O-Methyl | Ribo | 5′ and | — | Usually S |
| | | | 3′-ends | | |
| “Stab 7” | 2′-fluoro | 2′-deoxy | 5′ and | — | Usually S |
| | | | 3′-ends | | |
| “Stab 8” | 2′-fluoro | 2′-O- | — | 1 at 3′-end | Usually AS |
| | | Methyl | | | |
| “Stab 9” | Ribo | Ribo | 5′ and | — | Usually S |
| | | | 3′-ends | | |
| “Stab 10” | Ribo | Ribo | — | 1 at 3′-end | Usually AS |
| “Stab 11” | 2′-fluoro | 2′-deoxy | — | 1 at 3′-end | Usually AS |
| “Stab 12” | 2′-fluoro | LNA | 5′ and | | Usually S |
| | | | 3′-ends | | |
| “Stab 13” | 2′-fluoro | LNA | | 1 at 3′-end | Usually AS |
| “Stab 14” | 2′-fluoro | 2′-deoxy | | 2 at 5′-end | Usually AS |
| | | | | 1 at 3′-end | |
| “Stab 15” | 2′-deoxy | 2′-deoxy | | 2 at 5′-end | Usually AS |
| | | | | 1 at 3′-end | |
| “Stab 16 | Ribo | 2′-O- | 5′ and | | Usually S |
| | | Methyl | 3′-ends | | |
| “Stab 17” | 2′-O-Methyl | 2′-O- | 5′ and | | Usually S |
| | | Methyl | 3′-ends | | |
| “Stab 18” | 2′-fluoro | 2′-O- | 5′ and | 1 at 3′-end | Usually S |
| | | Methyl | 3′-ends | | |
| “Stab 19” | 2′-fluoro | 2′-O- | 3′-end | | Usually AS |
| | | Methyl | | | |
| “Stab 20” | 2′-fluoro | 2′-deoxy | 3′-end | | Usually AS |
| “Stab 21” | 2′-fluoro | Ribo | 3′-end | | Usually AS |
| “Stab 22” | Ribo | Ribo | 3′-end- | | Usually AS |

CAP = any terminal cap, see for example FIG. 10.
All Stab 1-22 chemistries can comprise 3′-terminal thymidine (TT) residues
All Stab 1-22 chemistries typically comprise about 21 nucleotides, but can vary as described herein.
S = sense strand
AS = antisense strand

[0416] TABLE V

| | | | | | |
|---|---|---|---|---|---|
| Reagent | Equivalents | Amount | Wait Time* DNA | Wait Time* 2′-O-methyl | Wait Time*RNA |

A. 2.5 μmol Synthesis Cycle ABI 394 Instrument

| | | | | | | | | | |
|---|---|---|---|---|---|---|---|---|---|
| Phosphoramidites | 6.5 | 163 | μL | 45 | sec | 2.5 | min | 7.5 | min |
| S-Ethyl Tetrazole | 23.8 | 238 | μL | 45 | sec | 2.5 | min | 7.5 | min |
| Acetic Anhydride | 100 | 233 | μL | 5 | sec | 5 | sec | 5 | sec |
| N-Methyl | 186 | 233 | μL | 5 | sec | 5 | sec | 5 | sec |
| Imidazole | | | | | | | | | |
| TCA | 176 | 2.3 | mL | 21 | sec | 21 | sec | 21 | sec |
| Iodine | 11.2 | 1.7 | mL | 45 | sec | 45 | sec | 45 | sec |
| Beaucage | 12.9 | 645 | μL | 100 | sec | 300 | sec | 300 | sec |

| | | | | | | |
|---|---|---|---|---|---|---|
| Acetonitrile | NA | 6.67 | mL | NA | NA | NA |

B. 0.2 μmol Synthesis Cycle ABI 394 Instrument

| | | | | | | | | | |
|---|---|---|---|---|---|---|---|---|---|
| Phosphoramidites | 15 | 31 | μL | 45 | sec | 233 | sec | 465 | sec |
| S-Ethyl Tetrazole | 38.7 | 31 | μL | 45 | sec | 233 | min | 465 | sec |
| Acetic Anhydride | 655 | 124 | μL | 5 | sec | 5 | sec | 5 | sec |
| N-Methyl | 1245 | 124 | μL | 5 | sec | 5 | sec | 5 | sec |
| Imidazole | | | | | | | | | |
| TCA | 700 | 732 | μL | 10 | sec | 10 | sec | 10 | sec |
| Iodine | 20.6 | 244 | μL | 15 | sec | 15 | sec | 15 | sec |
| Beaucage | 7.7 | 232 | μL | 100 | sec | 300 | sec | 300 | sec |

| | | | | | | |
|---|---|---|---|---|---|---|
| Acetonitrile | NA | 2.64 | mL | NA | NA | NA |

C. 0.2 μmol Synthesis Cycle 96 well Instrument

| | Equivalents: DNA/ | Amount: DNA/2′-O- | | | | Wait Time* 2′-O- | | | |
|---|---|---|---|---|---|---|---|---|---|
| Reagent | 2′-O-methyl/Ribo | methyl/Ribo | | Wait Time* DNA | | methyl | | Wait Time* Ribo | |
| Phosphoramidites | 22/33/66 | 40/60/120 | μL | 60 | sec | 180 | sec | 360 | sec |
| S-Ethyl Tetrazole | 70/105/210 | 40/60/120 | μL | 60 | sec | 180 | min | 360 | sec |
| Acetic Anhydride | 265/265/265 | 50/50/50 | μL | 10 | sec | 10 | sec | 10 | sec |
| N-Methyl | 502/502/502 | 50/50/50 | μL | 10 | sec | 10 | sec | 10 | sec |
| Imidazole | | | | | | | | | |
| TCA | 238/475/475 | 250/500/500 | μL | 15 | sec | 15 | sec | 15 | sec |
| Iodine | 6.8/6.8/6.8 | 80/80/80 | μL | 30 | sec | 30 | sec | 30 | sec |
| Beaucage | 34/51/51 | 80/120/120 | | 100 | sec | 200 | sec | 200 | sec |

| | | | | | | |
|---|---|---|---|---|---|---|
| Acetonitrile | NA | 1150/1150/1150 | μL | NA | NA | NA |

*Wait time does not include contact time during delivery.
*Tandem synthesis utilizes double coupling of linker molecule

The application's sequence listing, which the Patent Office published only in electronic form, follows.

SEQUENCE LISTING (3392 sequences)

SEQ ID NO: 1 - RNA, 19 nt, Artificial Sequence
  Description of Artificial Sequence:  Target Sequence/siNA sense region
acccaggaaaagccaacca

SEQ ID NO: 2 - RNA, 19 nt, Artificial Sequence
  Description of Artificial Sequence:  Target Sequence/siNA sense region
aaccucgaucucuuguaga

SEQ ID NO: 3 - RNA, 19 nt, Artificial Sequence
  Description of Artificial Sequence:  Target Sequence/siNA sense region
aucuguucucuaaacgaac

SEQ ID NO: 4 - RNA, 19 nt, Artificial Sequence
  Description of Artificial Sequence:  Target Sequence/siNA sense region
cuuuaaaaucuguguagcu

SEQ ID NO: 5 - RNA, 19 nt, Artificial Sequence
  Description of Artificial Sequence:  Target Sequence/siNA sense region
ugucgcucggcugcaugcc

SEQ ID NO: 6 - RNA, 19 nt, Artificial Sequence
  Description of Artificial Sequence:  Target Sequence/siNA sense region
cuagugcaccuacgcagua

SEQ ID NO: 7 - RNA, 19 nt, Artificial Sequence
  Description of Artificial Sequence:  Target Sequence/siNA sense region
auaaacaauaauaaauuuu

SEQ ID NO: 8 - RNA, 19 nt, Artificial Sequence
  Description of Artificial Sequence:  Target Sequence/siNA sense region
uacugucguugacaagaaa

SEQ ID NO: 9 - RNA, 19 nt, Artificial Sequence
  Description of Artificial Sequence:  Target Sequence/siNA sense region
acgaguaacucgucccucu

SEQ ID NO: 10 - RNA, 19 nt, Artificial Sequence
  Description of Artificial Sequence:  Target Sequence/siNA sense region
uucugcagacugcuuacgg

SEQ ID NO: 11 - RNA, 19 nt, Artificial Sequence
  Description of Artificial Sequence:  Target Sequence/siNA sense region
guuucguccguguugcagu

SEQ ID NO: 12 - RNA, 19 nt, Artificial Sequence
  Description of Artificial Sequence:  Target Sequence/siNA sense region
ucgaucaucagcauaccua

SEQ ID NO: 13 - RNA, 19 nt, Artificial Sequence
  Description of Artificial Sequence:  Target Sequence/siNA sense region
agguuucguccggguguga

SEQ ID NO: 14 - RNA, 19 nt, Artificial Sequence
  Description of Artificial Sequence:  Target Sequence/siNA sense region
accgaaagguaagauggag

SEQ ID NO: 15 - RNA, 19 nt, Artificial Sequence
  Description of Artificial Sequence:  Target Sequence/siNA sense region
gagccuuguucuugguguc

SEQ ID NO: 16 - RNA, 19 nt, Artificial Sequence
  Description of Artificial Sequence:  Target Sequence/siNA sense region
caacgagaaaacacacguc

SEQ ID NO: 17 - RNA, 19 nt, Artificial Sequence
  Description of Artificial Sequence:  Target Sequence/siNA sense region
ccaacucaguuugccuguc

SEQ ID NO: 18 - RNA, 19 nt, Artificial Sequence
  Description of Artificial Sequence:  Target Sequence/siNA sense region
ccuucagguuagagacgug

SEQ ID NO: 19 - RNA, 19 nt, Artificial Sequence
  Description of Artificial Sequence:  Target Sequence/siNA sense region
gcuagugcguggcuucggg

SEQ ID NO: 20 - RNA, 19 nt, Artificial Sequence
  Description of Artificial Sequence:  Target Sequence/siNA sense region
ggacucuguggaagaggcc

SEQ ID NO: 21 - RNA, 19 nt, Artificial Sequence
  Description of Artificial Sequence:  Target Sequence/siNA sense region
ccuaucggaggcacgugaa

SEQ ID NO: 22 - RNA, 19 nt, Artificial Sequence
  Description of Artificial Sequence:  Target Sequence/siNA sense region
acaccucaaaaauggcacu

SEQ ID NO: 23 - RNA, 19 nt, Artificial Sequence
  Description of Artificial Sequence:  Target Sequence/siNA sense region
uuguggucuaguagagcug

SEQ ID NO: 24 - RNA, 19 nt, Artificial Sequence
  Description of Artificial Sequence:  Target Sequence/siNA sense region
ggaaaaaggcguacugccc

SEQ ID NO: 25 - RNA, 19 nt, Artificial Sequence
  Description of Artificial Sequence:  Target Sequence/siNA sense region
ccagcuugaacagcccuau

SEQ ID NO: 26 - RNA, 19 nt, Artificial Sequence
  Description of Artificial Sequence:  Target Sequence/siNA sense region
uguguucauuaaacguucu

SEQ ID NO: 27 - RNA, 19 nt, Artificial Sequence
  Description of Artificial Sequence:  Target Sequence/siNA sense region
ugaugccuuaagcaccaau

SEQ ID NO: 28 - RNA, 19 nt, Artificial Sequence
  Description of Artificial Sequence:  Target Sequence/siNA sense region
ucacggccacaaggucguu

SEQ ID NO: 29 - RNA, 19 nt, Artificial Sequence
  Description of Artificial Sequence:  Target Sequence/siNA sense region
ugagcugguugcagaaaug

SEQ ID NO: 30 - RNA, 19 nt, Artificial Sequence
  Description of Artificial Sequence:  Target Sequence/siNA sense region
ggacggcauucaguacggu

SEQ ID NO: 31 - RNA, 19 nt, Artificial Sequence
  Description of Artificial Sequence:  Target Sequence/siNA sense region
ucguagcgguauaacacug

SEQ ID NO: 32 - RNA, 19 nt, Artificial Sequence
  Description of Artificial Sequence:  Target Sequence/siNA sense region
gggaguacucgugccacau

SEQ ID NO: 33 - RNA, 19 nt, Artificial Sequence
  Description of Artificial Sequence:  Target Sequence/siNA sense region
ugugggcgaaaccccaauu

SEQ ID NO: 34 - RNA, 19 nt, Artificial Sequence
  Description of Artificial Sequence:  Target Sequence/siNA sense region
ugcauaccgcaauguucuu

SEQ ID NO: 35 - RNA, 19 nt, Artificial Sequence
  Description of Artificial Sequence:  Target Sequence/siNA sense region
ucuucguaagaacgguaau

SEQ ID NO: 36 - RNA, 19 nt, Artificial Sequence
  Description of Artificial Sequence:  Target Sequence/siNA sense region
uaagggagccgguggucau

SEQ ID NO: 37 - RNA, 19 nt, Artificial Sequence
  Description of Artificial Sequence:  Target Sequence/siNA sense region
uagcuauggcaucgaucua

SEQ ID NO: 38 - RNA, 19 nt, Artificial Sequence
  Description of Artificial Sequence:  Target Sequence/siNA sense region
aaagucuuaugacuuaggu

SEQ ID NO: 39 - RNA, 19 nt, Artificial Sequence
  Description of Artificial Sequence:  Target Sequence/siNA sense region
ugacgagcuuggcacugau

SEQ ID NO: 40 - RNA, 19 nt, Artificial Sequence
  Description of Artificial Sequence:  Target Sequence/siNA sense region
ucccauugaagauuaugaa

SEQ ID NO: 41 - RNA, 19 nt, Artificial Sequence
  Description of Artificial Sequence:  Target Sequence/siNA sense region
acaaaacuggaacacuaag

SEQ ID NO: 42 - RNA, 19 nt, Artificial Sequence
  Description of Artificial Sequence:  Target Sequence/siNA sense region
gcauggcaguggugcacuc

SEQ ID NO: 43 - RNA, 19 nt, Artificial Sequence
  Description of Artificial Sequence:  Target Sequence/siNA sense region
ccgugaacucacucgugag

SEQ ID NO: 44 - RNA, 19 nt, Artificial Sequence
  Description of Artificial Sequence:  Target Sequence/siNA sense region
gcucaauggaggugcaguc

SEQ ID NO: 45 - RNA, 19 nt, Artificial Sequence
  Description of Artificial Sequence:  Target Sequence/siNA sense region
cacucgcuaugucgacaac

SEQ ID NO: 46 - RNA, 19 nt, Artificial Sequence
  Description of Artificial Sequence:  Target Sequence/siNA sense region
caauuucuguggcccagau

SEQ ID NO: 47 - RNA, 19 nt, Artificial Sequence
  Description of Artificial Sequence:  Target Sequence/siNA sense region
uggguacccucuugauugc

SEQ ID NO: 48 - RNA, 19 nt, Artificial Sequence
  Description of Artificial Sequence:  Target Sequence/siNA sense region
caucaaagauuuucucgca

SEQ ID NO: 49 - RNA, 19 nt, Artificial Sequence
  Description of Artificial Sequence:  Target Sequence/siNA sense region
acgcgcgggcaagucaaug

SEQ ID NO: 50 - RNA, 19 nt, Artificial Sequence
  Description of Artificial Sequence:  Target Sequence/siNA sense region
gugcacucuuuccgaacaa

SEQ ID NO: 51 - RNA, 19 nt, Artificial Sequence
  Description of Artificial Sequence:  Target Sequence/siNA sense region
acuugauuacaucgagucg

SEQ ID NO: 52 - RNA, 19 nt, Artificial Sequence
  Description of Artificial Sequence:  Target Sequence/siNA sense region
gaagagaggugucuacugc

SEQ ID NO: 53 - RNA, 19 nt, Artificial Sequence
  Description of Artificial Sequence:  Target Sequence/siNA sense region
cugccgugaccaugagcau

SEQ ID NO: 54 - RNA, 19 nt, Artificial Sequence
  Description of Artificial Sequence:  Target Sequence/siNA sense region
ugaaauugccugguucacu

SEQ ID NO: 55 - RNA, 19 nt, Artificial Sequence
  Description of Artificial Sequence:  Target Sequence/siNA sense region
ugagcgcucugauaagagc

SEQ ID NO: 56 - RNA, 19 nt, Artificial Sequence
  Description of Artificial Sequence:  Target Sequence/siNA sense region
cuacgagcaccagacaccc

SEQ ID NO: 57 - RNA, 19 nt, Artificial Sequence
  Description of Artificial Sequence:  Target Sequence/siNA sense region
cuucgaaauuaagagugcc

SEQ ID NO: 58 - RNA, 19 nt, Artificial Sequence
  Description of Artificial Sequence:  Target Sequence/siNA sense region
caagaaauuugacacuuuc

SEQ ID NO: 59 - RNA, 19 nt, Artificial Sequence
  Description of Artificial Sequence:  Target Sequence/siNA sense region
caaaggggaaugcccaaag

SEQ ID NO: 60 - RNA, 19 nt, Artificial Sequence
  Description of Artificial Sequence:  Target Sequence/siNA sense region
guuuguguuuccucuuaac

SEQ ID NO: 61 - RNA, 19 nt, Artificial Sequence
  Description of Artificial Sequence:  Target Sequence/siNA sense region
cucaaaagucaaagucauu

SEQ ID NO: 62 - RNA, 19 nt, Artificial Sequence
  Description of Artificial Sequence:  Target Sequence/siNA sense region
ucaaccacguguugaaaag

SEQ ID NO: 63 - RNA, 19 nt, Artificial Sequence
  Description of Artificial Sequence:  Target Sequence/siNA sense region
gaaaaagacugaggguuuc

SEQ ID NO: 64 - RNA, 19 nt, Artificial Sequence
  Description of Artificial Sequence:  Target Sequence/siNA sense region
cauggggcguauacgcucu

SEQ ID NO: 65 - RNA, 19 nt, Artificial Sequence
  Description of Artificial Sequence:  Target Sequence/siNA sense region
uguguacccuguugcaucu

SEQ ID NO: 66 - RNA, 19 nt, Artificial Sequence
  Description of Artificial Sequence:  Target Sequence/siNA sense region
uccacaggaguguaacaau

SEQ ID NO: 67 - RNA, 19 nt, Artificial Sequence
  Description of Artificial Sequence:  Target Sequence/siNA sense region
uaugcacuugucuaccuug

SEQ ID NO: 68 - RNA, 19 nt, Artificial Sequence
  Description of Artificial Sequence:  Target Sequence/siNA sense region
gaugaaauguaaucauugc

SEQ ID NO: 69 - RNA, 19 nt, Artificial Sequence
  Description of Artificial Sequence:  Target Sequence/siNA sense region
cgaugaaguuucauggcag

SEQ ID NO: 70 - RNA, 19 nt, Artificial Sequence
  Description of Artificial Sequence:  Target Sequence/siNA sense region
gacgugcgacuuucugaaa

SEQ ID NO: 71 - RNA, 19 nt, Artificial Sequence
  Description of Artificial Sequence:  Target Sequence/siNA sense region
agccacuugugaacauugu

SEQ ID NO: 72 - RNA, 19 nt, Artificial Sequence
  Description of Artificial Sequence:  Target Sequence/siNA sense region
uggcacugaaaauuuaguu

SEQ ID NO: 73 - RNA, 19 nt, Artificial Sequence
  Description of Artificial Sequence:  Target Sequence/siNA sense region
uauugaaggaccuacuaca

SEQ ID NO: 74 - RNA, 19 nt, Artificial Sequence
  Description of Artificial Sequence:  Target Sequence/siNA sense region
auguggguaccuaccuacu

SEQ ID NO: 75 - RNA, 19 nt, Artificial Sequence
  Description of Artificial Sequence:  Target Sequence/siNA sense region
uaaugcuguagugaaaaug

SEQ ID NO: 76 - RNA, 19 nt, Artificial Sequence
  Description of Artificial Sequence:  Target Sequence/siNA sense region
gccauguccugccugucaa

SEQ ID NO: 77 - RNA, 19 nt, Artificial Sequence
  Description of Artificial Sequence:  Target Sequence/siNA sense region
agacccagagauuggaccu

SEQ ID NO: 78 - RNA, 19 nt, Artificial Sequence
  Description of Artificial Sequence:  Target Sequence/siNA sense region
ugagcauaguguugcagau

SEQ ID NO: 79 - RNA, 19 nt, Artificial Sequence
  Description of Artificial Sequence:  Target Sequence/siNA sense region
uuaucacaaccacucaaac

SEQ ID NO: 80 - RNA, 19 nt, Artificial Sequence
  Description of Artificial Sequence:  Target Sequence/siNA sense region
cauugaaacucgacuccgc

SEQ ID NO: 81 - RNA, 19 nt, Artificial Sequence
  Description of Artificial Sequence:  Target Sequence/siNA sense region
caagggagguaggacuaga

SEQ ID NO: 82 - RNA, 19 nt, Artificial Sequence
  Description of Artificial Sequence:  Target Sequence/siNA sense region
auguuuuggaggcugugug

SEQ ID NO: 83 - RNA, 19 nt, Artificial Sequence
  Description of Artificial Sequence:  Target Sequence/siNA sense region
guuugccuauguuggcugc

SEQ ID NO: 84 - RNA, 19 nt, Artificial Sequence
  Description of Artificial Sequence:  Target Sequence/siNA sense region
cuauaauaagcgugccuac

SEQ ID NO: 85 - RNA, 19 nt, Artificial Sequence
  Description of Artificial Sequence:  Target Sequence/siNA sense region
cuggguuccucgugcuagu

SEQ ID NO: 86 - RNA, 19 nt, Artificial Sequence
  Description of Artificial Sequence:  Target Sequence/siNA sense region
ugcugauauuggcucaggc

SEQ ID NO: 87 - RNA, 19 nt, Artificial Sequence
  Description of Artificial Sequence:  Target Sequence/siNA sense region
ccauacuggcauuacuggu

SEQ ID NO: 88 - RNA, 19 nt, Artificial Sequence
  Description of Artificial Sequence:  Target Sequence/siNA sense region
ugacaauguggagaccuug

SEQ ID NO: 89 - RNA, 19 nt, Artificial Sequence
  Description of Artificial Sequence:  Target Sequence/siNA sense region
gaaugaggaucuccuugag

SEQ ID NO: 90 - RNA, 19 nt, Artificial Sequence
  Description of Artificial Sequence:  Target Sequence/siNA sense region
gauacugagucgugaacgu

SEQ ID NO: 91 - RNA, 19 nt, Artificial Sequence
  Description of Artificial Sequence:  Target Sequence/siNA sense region
uguuaacauuaacauuguu

SEQ ID NO: 92 - RNA, 19 nt, Artificial Sequence
  Description of Artificial Sequence:  Target Sequence/siNA sense region
uggcgauuuucauuugaau

SEQ ID NO: 93 - RNA, 19 nt, Artificial Sequence
  Description of Artificial Sequence:  Target Sequence/siNA sense region
ugaagagguugccaucauu

SEQ ID NO: 94 - RNA, 19 nt, Artificial Sequence
  Description of Artificial Sequence:  Target Sequence/siNA sense region
uuuggcaucuuucucugcu

SEQ ID NO: 95 - RNA, 19 nt, Artificial Sequence
  Description of Artificial Sequence:  Target Sequence/siNA sense region
uucuacaagugccuuuauu

SEQ ID NO: 96 - RNA, 19 nt, Artificial Sequence
  Description of Artificial Sequence:  Target Sequence/siNA sense region
ugacacuauaaagagucuu

SEQ ID NO: 97 - RNA, 19 nt, Artificial Sequence
  Description of Artificial Sequence:  Target Sequence/siNA sense region
ugauuacaagucuuucaaa

SEQ ID NO: 98 - RNA, 19 nt, Artificial Sequence
  Description of Artificial Sequence:  Target Sequence/siNA sense region
aaccauuguugaguccugc

SEQ ID NO: 99 - RNA, 19 nt, Artificial Sequence
  Description of Artificial Sequence:  Target Sequence/siNA sense region
cgguaacuauaaaguuacc

SEQ ID NO: 100 - RNA, 19 nt, Artificial Sequence
  Description of Artificial Sequence:  Target Sequence/siNA sense region
caagggaaagcccguaaaa

SEQ ID NO: 101 - RNA, 19 nt, Artificial Sequence
  Description of Artificial Sequence:  Target Sequence/siNA sense region
aggugcuuggaacauugga

SEQ ID NO: 102 - RNA, 19 nt, Artificial Sequence
  Description of Artificial Sequence:  Target Sequence/siNA sense region
acaacagagaucaguuuua

SEQ ID NO: 103 - RNA, 19 nt, Artificial Sequence
  Description of Artificial Sequence:  Target Sequence/siNA sense region
aacaccacugugugguuuu

SEQ ID NO: 104 - RNA, 19 nt, Artificial Sequence
  Description of Artificial Sequence:  Target Sequence/siNA sense region
ucccucacaggcugcuggu

SEQ ID NO: 105 - RNA, 19 nt, Artificial Sequence
  Description of Artificial Sequence:  Target Sequence/siNA sense region
uguuaucagaucaauuuuu

SEQ ID NO: 106 - RNA, 19 nt, Artificial Sequence
  Description of Artificial Sequence:  Target Sequence/siNA sense region
ugcgcgcacacuugaugca

SEQ ID NO: 107 - RNA, 19 nt, Artificial Sequence
  Description of Artificial Sequence:  Target Sequence/siNA sense region
agcaaaccacucaauuccu

SEQ ID NO: 108 - RNA, 19 nt, Artificial Sequence
  Description of Artificial Sequence:  Target Sequence/siNA sense region
ugauuugcaaagagcagcu

SEQ ID NO: 109 - RNA, 19 nt, Artificial Sequence
  Description of Artificial Sequence:  Target Sequence/siNA sense region
ugucaccauacuugauggu

SEQ ID NO: 110 - RNA, 19 nt, Artificial Sequence
  Description of Artificial Sequence:  Target Sequence/siNA sense region
uauuucugaacagucauua

SEQ ID NO: 111 - RNA, 19 nt, Artificial Sequence
  Description of Artificial Sequence:  Target Sequence/siNA sense region
acgucuugucgacgccaug

SEQ ID NO: 112 - RNA, 19 nt, Artificial Sequence
  Description of Artificial Sequence:  Target Sequence/siNA sense region
gguuuauacuucagaccug

SEQ ID NO: 113 - RNA, 19 nt, Artificial Sequence
  Description of Artificial Sequence:  Target Sequence/siNA sense region
gcucaccaacagugucauu

SEQ ID NO: 114 - RNA, 19 nt, Artificial Sequence
  Description of Artificial Sequence:  Target Sequence/siNA sense region
uauuauggcauauguaacu

SEQ ID NO: 115 - RNA, 19 nt, Artificial Sequence
  Description of Artificial Sequence:  Target Sequence/siNA sense region
ugguggucuuguacaacag

SEQ ID NO: 116 - RNA, 19 nt, Artificial Sequence
  Description of Artificial Sequence:  Target Sequence/siNA sense region
gacuucucagugguugucu

SEQ ID NO: 117 - RNA, 19 nt, Artificial Sequence
  Description of Artificial Sequence:  Target Sequence/siNA sense region
uaaucuuuugggcacuacu

SEQ ID NO: 118 - RNA, 19 nt, Artificial Sequence
  Description of Artificial Sequence:  Target Sequence/siNA sense region
uguugaaaaacucaggccu

SEQ ID NO: 119 - RNA, 19 nt, Artificial Sequence
  Description of Artificial Sequence:  Target Sequence/siNA sense region
uaucuuugaauggauugag

SEQ ID NO: 120 - RNA, 19 nt, Artificial Sequence
  Description of Artificial Sequence:  Target Sequence/siNA sense region
ggcgaaacuuagugcagga

SEQ ID NO: 121 - RNA, 19 nt, Artificial Sequence
  Description of Artificial Sequence:  Target Sequence/siNA sense region
aguugaauuucucaaggau

SEQ ID NO: 122 - RNA, 19 nt, Artificial Sequence
  Description of Artificial Sequence:  Target Sequence/siNA sense region
ugcuugggagauucucaaa

SEQ ID NO: 123 - RNA, 19 nt, Artificial Sequence
  Description of Artificial Sequence:  Target Sequence/siNA sense region
auuucucauuacagguguu

SEQ ID NO: 124 - RNA, 19 nt, Artificial Sequence
  Description of Artificial Sequence:  Target Sequence/siNA sense region
uuuugacaucgucaagggu

SEQ ID NO: 125 - RNA, 19 nt, Artificial Sequence
  Description of Artificial Sequence:  Target Sequence/siNA sense region
ucaaauacagguugcuuca

SEQ ID NO: 126 - RNA, 19 nt, Artificial Sequence
  Description of Artificial Sequence:  Target Sequence/siNA sense region
agauaacaucaaggauugu

SEQ ID NO: 127 - RNA, 19 nt, Artificial Sequence
  Description of Artificial Sequence:  Target Sequence/siNA sense region
uguaaaaugcuucauugau

SEQ ID NO: 128 - RNA, 19 nt, Artificial Sequence
  Description of Artificial Sequence:  Target Sequence/siNA sense region
uguuguuaacaaggcacuc

SEQ ID NO: 129 - RNA, 19 nt, Artificial Sequence
  Description of Artificial Sequence:  Target Sequence/siNA sense region
cgaaaugugcauugaucaa

SEQ ID NO: 130 - RNA, 19 nt, Artificial Sequence
  Description of Artificial Sequence:  Target Sequence/siNA sense region
agucacuaucgcuggcgca

SEQ ID NO: 131 - RNA, 19 nt, Artificial Sequence
  Description of Artificial Sequence:  Target Sequence/siNA sense region
aaaguugcgaucacucaac

SEQ ID NO: 132 - RNA, 19 nt, Artificial Sequence
  Description of Artificial Sequence:  Target Sequence/siNA sense region
cuuaggugaagucuucauc

SEQ ID NO: 133 - RNA, 19 nt, Artificial Sequence
  Description of Artificial Sequence:  Target Sequence/siNA sense region
cgcucaaagcaagggacuu

SEQ ID NO: 134 - RNA, 19 nt, Artificial Sequence
  Description of Artificial Sequence:  Target Sequence/siNA sense region
uuaccgucaguguauacgu

SEQ ID NO: 135 - RNA, 19 nt, Artificial Sequence
  Description of Artificial Sequence:  Target Sequence/siNA sense region
uggcaaggagcagcugcaa

SEQ ID NO: 136 - RNA, 19 nt, Artificial Sequence
  Description of Artificial Sequence:  Target Sequence/siNA sense region
acuacucaugccucuuaag

SEQ ID NO: 137 - RNA, 19 nt, Artificial Sequence
  Description of Artificial Sequence:  Target Sequence/siNA sense region
ggcaccaaaagaaguaacc

SEQ ID NO: 138 - RNA, 19 nt, Artificial Sequence
  Description of Artificial Sequence:  Target Sequence/siNA sense region
cuuucuugaaggugauuca

SEQ ID NO: 139 - RNA, 19 nt, Artificial Sequence
  Description of Artificial Sequence:  Target Sequence/siNA sense region
acaugacacaguacuuacc

SEQ ID NO: 140 - RNA, 19 nt, Artificial Sequence
  Description of Artificial Sequence:  Target Sequence/siNA sense region
cucugaggagguuguucuc

SEQ ID NO: 141 - RNA, 19 nt, Artificial Sequence
  Description of Artificial Sequence:  Target Sequence/siNA sense region
caagaacggugaacucgaa

SEQ ID NO: 142 - RNA, 19 nt, Artificial Sequence
  Description of Artificial Sequence:  Target Sequence/siNA sense region
agcacucgagacgcccguu

SEQ ID NO: 143 - RNA, 19 nt, Artificial Sequence
  Description of Artificial Sequence:  Target Sequence/siNA sense region
ugauagcuucacaaaugga

SEQ ID NO: 144 - RNA, 19 nt, Artificial Sequence
  Description of Artificial Sequence:  Target Sequence/siNA sense region
agcuaucgucggcacacca

SEQ ID NO: 145 - RNA, 19 nt, Artificial Sequence
  Description of Artificial Sequence:  Target Sequence/siNA sense region
agucuguguaaauggccuc

SEQ ID NO: 146 - RNA, 19 nt, Artificial Sequence
  Description of Artificial Sequence:  Target Sequence/siNA sense region
caugcucuuagagauuaag

SEQ ID NO: 147 - RNA, 19 nt, Artificial Sequence
  Description of Artificial Sequence:  Target Sequence/siNA sense region
ggacaaagaacaauacugc

SEQ ID NO: 148 - RNA, 19 nt, Artificial Sequence
  Description of Artificial Sequence:  Target Sequence/siNA sense region
cgcauugucuccugguuua

SEQ ID NO: 149 - RNA, 19 nt, Artificial Sequence
  Description of Artificial Sequence:  Target Sequence/siNA sense region
acuggcuacaaacaauguc

SEQ ID NO: 150 - RNA, 19 nt, Artificial Sequence
  Description of Artificial Sequence:  Target Sequence/siNA sense region
cuuucgcuuaaaagggggu

SEQ ID NO: 151 - RNA, 19 nt, Artificial Sequence
  Description of Artificial Sequence:  Target Sequence/siNA sense region
ugcaccaauuaaaggugua

SEQ ID NO: 152 - RNA, 19 nt, Artificial Sequence
  Description of Artificial Sequence:  Target Sequence/siNA sense region
aaccuuuggagaagauacu

SEQ ID NO: 153 - RNA, 19 nt, Artificial Sequence
  Description of Artificial Sequence:  Target Sequence/siNA sense region
uguuugggaaguucaaggu

SEQ ID NO: 154 - RNA, 19 nt, Artificial Sequence
  Description of Artificial Sequence:  Target Sequence/siNA sense region
uuacaagaaugugagaauc

SEQ ID NO: 155 - RNA, 19 nt, Artificial Sequence
  Description of Artificial Sequence:  Target Sequence/siNA sense region
cacauuugagcuugaugaa

SEQ ID NO: 156 - RNA, 19 nt, Artificial Sequence
  Description of Artificial Sequence:  Target Sequence/siNA sense region
acguguugacaaagugcuu

SEQ ID NO: 157 - RNA, 19 nt, Artificial Sequence
  Description of Artificial Sequence:  Target Sequence/siNA sense region
uaaugaaaagugcucuguc

SEQ ID NO: 158 - RNA, 19 nt, Artificial Sequence
  Description of Artificial Sequence:  Target Sequence/siNA sense region
cuacacuguugaauccggu

SEQ ID NO: 159 - RNA, 19 nt, Artificial Sequence
  Description of Artificial Sequence:  Target Sequence/siNA sense region
uaccgaaguuacugaguuu

SEQ ID NO: 160 - RNA, 19 nt, Artificial Sequence
  Description of Artificial Sequence:  Target Sequence/siNA sense region
ugcauguguuguagcagag

SEQ ID NO: 161 - RNA, 19 nt, Artificial Sequence
  Description of Artificial Sequence:  Target Sequence/siNA sense region
ggcuguugugaagacuuua

SEQ ID NO: 162 - RNA, 19 nt, Artificial Sequence
  Description of Artificial Sequence:  Target Sequence/siNA sense region
acaaccaguuucugaucuc

SEQ ID NO: 163 - RNA, 19 nt, Artificial Sequence
  Description of Artificial Sequence:  Target Sequence/siNA sense region
ccuuaccaacauggguauu

SEQ ID NO: 164 - RNA, 19 nt, Artificial Sequence
  Description of Artificial Sequence:  Target Sequence/siNA sense region
ugaucuugaugaguggagu

SEQ ID NO: 165 - RNA, 19 nt, Artificial Sequence
  Description of Artificial Sequence:  Target Sequence/siNA sense region
uguagcuacauucuacuua

SEQ ID NO: 166 - RNA, 19 nt, Artificial Sequence
  Description of Artificial Sequence:  Target Sequence/siNA sense region
auuugaugaugcuggugaa

SEQ ID NO: 167 - RNA, 19 nt, Artificial Sequence
  Description of Artificial Sequence:  Target Sequence/siNA sense region
agaaaacuuuucaucacgu

SEQ ID NO: 168 - RNA, 19 nt, Artificial Sequence
  Description of Artificial Sequence:  Target Sequence/siNA sense region
uauguauuguuccuuuuac

SEQ ID NO: 169 - RNA, 19 nt, Artificial Sequence
  Description of Artificial Sequence:  Target Sequence/siNA sense region
cccuccagaugaggaagaa

SEQ ID NO: 170 - RNA, 19 nt, Artificial Sequence
  Description of Artificial Sequence:  Target Sequence/siNA sense region
agaggacgaugcagagugu

SEQ ID NO: 171 - RNA, 19 nt, Artificial Sequence
  Description of Artificial Sequence:  Target Sequence/siNA sense region
ugaggaagaagaaauugau

SEQ ID NO: 172 - RNA, 19 nt, Artificial Sequence
  Description of Artificial Sequence:  Target Sequence/siNA sense region
ugaaaccugugaacaugag

SEQ ID NO: 173 - RNA, 19 nt, Artificial Sequence
  Description of Artificial Sequence:  Target Sequence/siNA sense region
guacgguacagaggaugau

SEQ ID NO: 174 - RNA, 19 nt, Artificial Sequence
  Description of Artificial Sequence:  Target Sequence/siNA sense region
uuaucaaggucucccucug

SEQ ID NO: 175 - RNA, 19 nt, Artificial Sequence
  Description of Artificial Sequence:  Target Sequence/siNA sense region
ggaauuuggugccucagcu

SEQ ID NO: 176 - RNA, 19 nt, Artificial Sequence
  Description of Artificial Sequence:  Target Sequence/siNA sense region
ugaaacaguucgaguugag

SEQ ID NO: 177 - RNA, 19 nt, Artificial Sequence
  Description of Artificial Sequence:  Target Sequence/siNA sense region
ggaagaagaagaggaagac

SEQ ID NO: 178 - RNA, 19 nt, Artificial Sequence
  Description of Artificial Sequence:  Target Sequence/siNA sense region
cuggcuggaugauacuacu

SEQ ID NO: 179 - RNA, 19 nt, Artificial Sequence
  Description of Artificial Sequence:  Target Sequence/siNA sense region
ugagcaaucagagauugag

SEQ ID NO: 180 - RNA, 19 nt, Artificial Sequence
  Description of Artificial Sequence:  Target Sequence/siNA sense region
gccagaaccagaaccuaca

SEQ ID NO: 181 - RNA, 19 nt, Artificial Sequence
  Description of Artificial Sequence:  Target Sequence/siNA sense region
accugaagaaccaguuaau

SEQ ID NO: 182 - RNA, 19 nt, Artificial Sequence
  Description of Artificial Sequence:  Target Sequence/siNA sense region
ucaguuuacugguuauuua

SEQ ID NO: 183 - RNA, 19 nt, Artificial Sequence
  Description of Artificial Sequence:  Target Sequence/siNA sense region
aaaacuuacugacaauguu

SEQ ID NO: 184 - RNA, 19 nt, Artificial Sequence
  Description of Artificial Sequence:  Target Sequence/siNA sense region
ugccauuaaauguguugac

SEQ ID NO: 185 - RNA, 19 nt, Artificial Sequence
  Description of Artificial Sequence:  Target Sequence/siNA sense region
caucguuaaggaggcacaa

SEQ ID NO: 186 - RNA, 19 nt, Artificial Sequence
  Description of Artificial Sequence:  Target Sequence/siNA sense region
aagugcuaauccuauggug

SEQ ID NO: 187 - RNA, 19 nt, Artificial Sequence
  Description of Artificial Sequence:  Target Sequence/siNA sense region
gauuguaaaugcugcuaac

SEQ ID NO: 188 - RNA, 19 nt, Artificial Sequence
  Description of Artificial Sequence:  Target Sequence/siNA sense region
cauacaccugaaacauggu

SEQ ID NO: 189 - RNA, 19 nt, Artificial Sequence
  Description of Artificial Sequence:  Target Sequence/siNA sense region
uggugguguagcaggugca

SEQ ID NO: 190 - RNA, 19 nt, Artificial Sequence
  Description of Artificial Sequence:  Target Sequence/siNA sense region
acucaacaaggcaaccaau

SEQ ID NO: 191 - RNA, 19 nt, Artificial Sequence
  Description of Artificial Sequence:  Target Sequence/siNA sense region
uggugccaugcaaaaggag

SEQ ID NO: 192 - RNA, 19 nt, Artificial Sequence
  Description of Artificial Sequence:  Target Sequence/siNA sense region
gagugaugauuacauuaag

SEQ ID NO: 193 - RNA, 19 nt, Artificial Sequence
  Description of Artificial Sequence:  Target Sequence/siNA sense region
gcuaaauggcccucuuaca

SEQ ID NO: 194 - RNA, 19 nt, Artificial Sequence
  Description of Artificial Sequence:  Target Sequence/siNA sense region
aguaggagggucuuguuug

SEQ ID NO: 195 - RNA, 19 nt, Artificial Sequence
  Description of Artificial Sequence:  Target Sequence/siNA sense region
gcuuucuggacauaaucuu

SEQ ID NO: 196 - RNA, 19 nt, Artificial Sequence
  Description of Artificial Sequence:  Target Sequence/siNA sense region
ugcuaagaagugucugcau

SEQ ID NO: 197 - RNA, 19 nt, Artificial Sequence
  Description of Artificial Sequence:  Target Sequence/siNA sense region
uguuguuggaccuaaccua

SEQ ID NO: 198 - RNA, 19 nt, Artificial Sequence
  Description of Artificial Sequence:  Target Sequence/siNA sense region
aaaugcaggugaggacauc

SEQ ID NO: 199 - RNA, 19 nt, Artificial Sequence
  Description of Artificial Sequence:  Target Sequence/siNA sense region
ccagcuucuuaaggcagca

SEQ ID NO: 200 - RNA, 19 nt, Artificial Sequence
  Description of Artificial Sequence:  Target Sequence/siNA sense region
auaugaaaauuucaauuca

SEQ ID NO: 201 - RNA, 19 nt, Artificial Sequence
  Description of Artificial Sequence:  Target Sequence/siNA sense region
acaggacaucuuacuugca

SEQ ID NO: 202 - RNA, 19 nt, Artificial Sequence
  Description of Artificial Sequence:  Target Sequence/siNA sense region
accauuguugucagcaggc

SEQ ID NO: 203 - RNA, 19 nt, Artificial Sequence
  Description of Artificial Sequence:  Target Sequence/siNA sense region
cauauuuggugcuaaacca

SEQ ID NO: 204 - RNA, 19 nt, Artificial Sequence
  Description of Artificial Sequence:  Target Sequence/siNA sense region
acuucagucuuuacaagug

SEQ ID NO: 205 - RNA, 19 nt, Artificial Sequence
  Description of Artificial Sequence:  Target Sequence/siNA sense region
gugcgugcagacgguucgu

SEQ ID NO: 206 - RNA, 19 nt, Artificial Sequence
  Description of Artificial Sequence:  Target Sequence/siNA sense region
uacacagguuuauauugca

SEQ ID NO: 207 - RNA, 19 nt, Artificial Sequence
  Description of Artificial Sequence:  Target Sequence/siNA sense region
agucaaugacaaagcucuu

SEQ ID NO: 208 - RNA, 19 nt, Artificial Sequence
  Description of Artificial Sequence:  Target Sequence/siNA sense region
uuaugagcagguugucaug

SEQ ID NO: 209 - RNA, 19 nt, Artificial Sequence
  Description of Artificial Sequence:  Target Sequence/siNA sense region
ggauuaucuugauaaccug

SEQ ID NO: 210 - RNA, 19 nt, Artificial Sequence
  Description of Artificial Sequence:  Target Sequence/siNA sense region
gaagccuagaguggaagca

SEQ ID NO: 211 - RNA, 19 nt, Artificial Sequence
  Description of Artificial Sequence:  Target Sequence/siNA sense region
accuaaacaagaggagcca

SEQ ID NO: 212 - RNA, 19 nt, Artificial Sequence
  Description of Artificial Sequence:  Target Sequence/siNA sense region
accaaacacagaagauucc

SEQ ID NO: 213 - RNA, 19 nt, Artificial Sequence
  Description of Artificial Sequence:  Target Sequence/siNA sense region
caaaacugaggagaaaucu

SEQ ID NO: 214 - RNA, 19 nt, Artificial Sequence
  Description of Artificial Sequence:  Target Sequence/siNA sense region
ugucguacagaagccuguc

SEQ ID NO: 215 - RNA, 19 nt, Artificial Sequence
  Description of Artificial Sequence:  Target Sequence/siNA sense region
cgaugugaagccaaaaauu

SEQ ID NO: 216 - RNA, 19 nt, Artificial Sequence
  Description of Artificial Sequence:  Target Sequence/siNA sense region
uaaggccugcauugaugag

SEQ ID NO: 217 - RNA, 19 nt, Artificial Sequence
  Description of Artificial Sequence:  Target Sequence/siNA sense region
gguuaccacaacacuggaa

SEQ ID NO: 218 - RNA, 19 nt, Artificial Sequence
  Description of Artificial Sequence:  Target Sequence/siNA sense region
agaaacuaaguuucuuacc

SEQ ID NO: 219 - RNA, 19 nt, Artificial Sequence
  Description of Artificial Sequence:  Target Sequence/siNA sense region
caauaaguuacucuuguuu

SEQ ID NO: 220 - RNA, 19 nt, Artificial Sequence
  Description of Artificial Sequence:  Target Sequence/siNA sense region
ugcugauaucaaugguaag

SEQ ID NO: 221 - RNA, 19 nt, Artificial Sequence
  Description of Artificial Sequence:  Target Sequence/siNA sense region
gcuuuaccaugauucucag

SEQ ID NO: 222 - RNA, 19 nt, Artificial Sequence
  Description of Artificial Sequence:  Target Sequence/siNA sense region
gaacaugcuuagaggugaa

SEQ ID NO: 223 - RNA, 19 nt, Artificial Sequence
  Description of Artificial Sequence:  Target Sequence/siNA sense region
agauaugucuuuccuugag

SEQ ID NO: 224 - RNA, 19 nt, Artificial Sequence
  Description of Artificial Sequence:  Target Sequence/siNA sense region
gaaggaugcaccuuacaug

SEQ ID NO: 225 - RNA, 19 nt, Artificial Sequence
  Description of Artificial Sequence:  Target Sequence/siNA sense region
gguaggugauguuaucacu

SEQ ID NO: 226 - RNA, 19 nt, Artificial Sequence
  Description of Artificial Sequence:  Target Sequence/siNA sense region
uaguggugauaucacuugu

SEQ ID NO: 227 - RNA, 19 nt, Artificial Sequence
  Description of Artificial Sequence:  Target Sequence/siNA sense region
uguuguaauacccuccaaa

SEQ ID NO: 228 - RNA, 19 nt, Artificial Sequence
  Description of Artificial Sequence:  Target Sequence/siNA sense region
aaaggcugguggcacuacu

SEQ ID NO: 229 - RNA, 19 nt, Artificial Sequence
  Description of Artificial Sequence:  Target Sequence/siNA sense region
ugagaugcucucaagagcu

SEQ ID NO: 230 - RNA, 19 nt, Artificial Sequence
  Description of Artificial Sequence:  Target Sequence/siNA sense region
uuugaagaaagugccaguu

SEQ ID NO: 231 - RNA, 19 nt, Artificial Sequence
  Description of Artificial Sequence:  Target Sequence/siNA sense region
ugaugaguauauaaccacg

SEQ ID NO: 232 - RNA, 19 nt, Artificial Sequence
  Description of Artificial Sequence:  Target Sequence/siNA sense region
guacccuggacaaggaugu

SEQ ID NO: 233 - RNA, 19 nt, Artificial Sequence
  Description of Artificial Sequence:  Target Sequence/siNA sense region
ugcugguuauacacuugag

SEQ ID NO: 234 - RNA, 19 nt, Artificial Sequence
  Description of Artificial Sequence:  Target Sequence/siNA sense region
ggaagcuaagacugcucuu

SEQ ID NO: 235 - RNA, 19 nt, Artificial Sequence
  Description of Artificial Sequence:  Target Sequence/siNA sense region
uaagaaaugcaaaucugca

SEQ ID NO: 236 - RNA, 19 nt, Artificial Sequence
  Description of Artificial Sequence:  Target Sequence/siNA sense region
auuuuauguacuaccuuca

SEQ ID NO: 237 - RNA, 19 nt, Artificial Sequence
  Description of Artificial Sequence:  Target Sequence/siNA sense region
agaagcaccuaaugcuaag

SEQ ID NO: 238 - RNA, 19 nt, Artificial Sequence
  Description of Artificial Sequence:  Target Sequence/siNA sense region
ggaagagauucuaggaacu

SEQ ID NO: 239 - RNA, 19 nt, Artificial Sequence
  Description of Artificial Sequence:  Target Sequence/siNA sense region
uguauccuggaauuugaga

SEQ ID NO: 240 - RNA, 19 nt, Artificial Sequence
  Description of Artificial Sequence:  Target Sequence/siNA sense region
agaaaugcuugcucaugcu

SEQ ID NO: 241 - RNA, 19 nt, Artificial Sequence
  Description of Artificial Sequence:  Target Sequence/siNA sense region
ugaagagacaagaaaauua

SEQ ID NO: 242 - RNA, 19 nt, Artificial Sequence
  Description of Artificial Sequence:  Target Sequence/siNA sense region
aaugccuauaugcauggau

SEQ ID NO: 243 - RNA, 19 nt, Artificial Sequence
  Description of Artificial Sequence:  Target Sequence/siNA sense region
uguuagagccauaauggca

SEQ ID NO: 244 - RNA, 19 nt, Artificial Sequence
  Description of Artificial Sequence:  Target Sequence/siNA sense region
aaccauccaacguaaguau

SEQ ID NO: 245 - RNA, 19 nt, Artificial Sequence
  Description of Artificial Sequence:  Target Sequence/siNA sense region
uaaaggaauuaaaauucaa

SEQ ID NO: 246 - RNA, 19 nt, Artificial Sequence
  Description of Artificial Sequence:  Target Sequence/siNA sense region
agagggcaucguugacuau

SEQ ID NO: 247 - RNA, 19 nt, Artificial Sequence
  Description of Artificial Sequence:  Target Sequence/siNA sense region
ugguguccgauucuucuuu

SEQ ID NO: 248 - RNA, 19 nt, Artificial Sequence
  Description of Artificial Sequence:  Target Sequence/siNA sense region
uuauacuaguaaagagccu

SEQ ID NO: 249 - RNA, 19 nt, Artificial Sequence
  Description of Artificial Sequence:  Target Sequence/siNA sense region
uguagcuucuauuauuacg

SEQ ID NO: 250 - RNA, 19 nt, Artificial Sequence
  Description of Artificial Sequence:  Target Sequence/siNA sense region
gaagcugaacucucuaaau

SEQ ID NO: 251 - RNA, 19 nt, Artificial Sequence
  Description of Artificial Sequence:  Target Sequence/siNA sense region
ugagccgcuugucacaaug

SEQ ID NO: 252 - RNA, 19 nt, Artificial Sequence
  Description of Artificial Sequence:  Target Sequence/siNA sense region
gccaauugguuaugugaca

SEQ ID NO: 253 - RNA, 19 nt, Artificial Sequence
  Description of Artificial Sequence:  Target Sequence/siNA sense region
acaugguuuuaaucuugaa

SEQ ID NO: 254 - RNA, 19 nt, Artificial Sequence
  Description of Artificial Sequence:  Target Sequence/siNA sense region
agaggcugcgcgcuguaug

SEQ ID NO: 255 - RNA, 19 nt, Artificial Sequence
  Description of Artificial Sequence:  Target Sequence/siNA sense region
gcguucucuuaaagcuccu

SEQ ID NO: 256 - RNA, 19 nt, Artificial Sequence
  Description of Artificial Sequence:  Target Sequence/siNA sense region
ugccguagugucaguauca

SEQ ID NO: 257 - RNA, 19 nt, Artificial Sequence
  Description of Artificial Sequence:  Target Sequence/siNA sense region
aucaccagaugcuguuacu

SEQ ID NO: 258 - RNA, 19 nt, Artificial Sequence
  Description of Artificial Sequence:  Target Sequence/siNA sense region
uacauauaauggauaccuc

SEQ ID NO: 259 - RNA, 19 nt, Artificial Sequence
  Description of Artificial Sequence:  Target Sequence/siNA sense region
cacuucgucaucaaagaca

SEQ ID NO: 260 - RNA, 19 nt, Artificial Sequence
  Description of Artificial Sequence:  Target Sequence/siNA sense region
aucugaggagcacuuugua

SEQ ID NO: 261 - RNA, 19 nt, Artificial Sequence
  Description of Artificial Sequence:  Target Sequence/siNA sense region
agaaacaguuucuuuggcu

SEQ ID NO: 262 - RNA, 19 nt, Artificial Sequence
  Description of Artificial Sequence:  Target Sequence/siNA sense region
uggcucuuacagagauugg

SEQ ID NO: 263 - RNA, 19 nt, Artificial Sequence
  Description of Artificial Sequence:  Target Sequence/siNA sense region
guccuauucaggacagcgu

SEQ ID NO: 264 - RNA, 19 nt, Artificial Sequence
  Description of Artificial Sequence:  Target Sequence/siNA sense region
uacagaguuagguguugaa

SEQ ID NO: 265 - RNA, 19 nt, Artificial Sequence
  Description of Artificial Sequence:  Target Sequence/siNA sense region
auuucuuaagcguggugac

SEQ ID NO: 266 - RNA, 19 nt, Artificial Sequence
  Description of Artificial Sequence:  Target Sequence/siNA sense region
caaaauuguguaccacacu

SEQ ID NO: 267 - RNA, 19 nt, Artificial Sequence
  Description of Artificial Sequence:  Target Sequence/siNA sense region
ucuggagagccccgucgag

SEQ ID NO: 268 - RNA, 19 nt, Artificial Sequence
  Description of Artificial Sequence:  Target Sequence/siNA sense region
guuucaucuugacggugag

SEQ ID NO: 269 - RNA, 19 nt, Artificial Sequence
  Description of Artificial Sequence:  Target Sequence/siNA sense region
gguucuuucacuugacaaa

SEQ ID NO: 270 - RNA, 19 nt, Artificial Sequence
  Description of Artificial Sequence:  Target Sequence/siNA sense region
acuaaagagucucuuaucc

SEQ ID NO: 271 - RNA, 19 nt, Artificial Sequence
  Description of Artificial Sequence:  Target Sequence/siNA sense region
ccugcgggagguuaagacu

SEQ ID NO: 272 - RNA, 19 nt, Artificial Sequence
  Description of Artificial Sequence:  Target Sequence/siNA sense region
uauaaaaguguucacaacu

SEQ ID NO: 273 - RNA, 19 nt, Artificial Sequence
  Description of Artificial Sequence:  Target Sequence/siNA sense region
uguggacaacacuaaucuc

SEQ ID NO: 274 - RNA, 19 nt, Artificial Sequence
  Description of Artificial Sequence:  Target Sequence/siNA sense region
ccacacacagcuuguggau

SEQ ID NO: 275 - RNA, 19 nt, Artificial Sequence
  Description of Artificial Sequence:  Target Sequence/siNA sense region
uaugucuaugacauaugga

SEQ ID NO: 276 - RNA, 19 nt, Artificial Sequence
  Description of Artificial Sequence:  Target Sequence/siNA sense region
acagcaguuugguccaaca

SEQ ID NO: 277 - RNA, 19 nt, Artificial Sequence
  Description of Artificial Sequence:  Target Sequence/siNA sense region
auacuuggauggugcugau

SEQ ID NO: 278 - RNA, 19 nt, Artificial Sequence
  Description of Artificial Sequence:  Target Sequence/siNA sense region
uguuacaaaaauuaaaccu

SEQ ID NO: 279 - RNA, 19 nt, Artificial Sequence
  Description of Artificial Sequence:  Target Sequence/siNA sense region
ucauguaaaucaugagggu

SEQ ID NO: 280 - RNA, 19 nt, Artificial Sequence
  Description of Artificial Sequence:  Target Sequence/siNA sense region
uaagacuuucuuuguacua

SEQ ID NO: 281 - RNA, 19 nt, Artificial Sequence
  Description of Artificial Sequence:  Target Sequence/siNA sense region
accuagugaugacacacua

SEQ ID NO: 282 - RNA, 19 nt, Artificial Sequence
  Description of Artificial Sequence:  Target Sequence/siNA sense region
acguagugaagcuuucgag

SEQ ID NO: 283 - RNA, 19 nt, Artificial Sequence
  Description of Artificial Sequence:  Target Sequence/siNA sense region
guacuaccauacucuugau

SEQ ID NO: 284 - RNA, 19 nt, Artificial Sequence
  Description of Artificial Sequence:  Target Sequence/siNA sense region
ugagaguuuucuugguagg

SEQ ID NO: 285 - RNA, 19 nt, Artificial Sequence
  Description of Artificial Sequence:  Target Sequence/siNA sense region
guacaugucugcuuuaaac

SEQ ID NO: 286 - RNA, 19 nt, Artificial Sequence
  Description of Artificial Sequence:  Target Sequence/siNA sense region
ccacacaaagaaauggaaa

SEQ ID NO: 287 - RNA, 19 nt, Artificial Sequence
  Description of Artificial Sequence:  Target Sequence/siNA sense region
auuuccucaaguugguggu

SEQ ID NO: 288 - RNA, 19 nt, Artificial Sequence
  Description of Artificial Sequence:  Target Sequence/siNA sense region
uuuaacuucaauuaaaugg

SEQ ID NO: 289 - RNA, 19 nt, Artificial Sequence
  Description of Artificial Sequence:  Target Sequence/siNA sense region
ggcugauaacaauuguuau

SEQ ID NO: 290 - RNA, 19 nt, Artificial Sequence
  Description of Artificial Sequence:  Target Sequence/siNA sense region
uuugucuaguguuuuauua

SEQ ID NO: 291 - RNA, 19 nt, Artificial Sequence
  Description of Artificial Sequence:  Target Sequence/siNA sense region
agcacuucaacagcuugaa

SEQ ID NO: 292 - RNA, 19 nt, Artificial Sequence
  Description of Artificial Sequence:  Target Sequence/siNA sense region
agucaaauucaaugcacca

SEQ ID NO: 293 - RNA, 19 nt, Artificial Sequence
  Description of Artificial Sequence:  Target Sequence/siNA sense region
agcacuucaagaggcuuau

SEQ ID NO: 294 - RNA, 19 nt, Artificial Sequence
  Description of Artificial Sequence:  Target Sequence/siNA sense region
uuauagagcccgugcuggu

SEQ ID NO: 295 - RNA, 19 nt, Artificial Sequence
  Description of Artificial Sequence:  Target Sequence/siNA sense region
ugaugcugcuaacuuuugu

SEQ ID NO: 296 - RNA, 19 nt, Artificial Sequence
  Description of Artificial Sequence:  Target Sequence/siNA sense region
ugcacucauacucgcuuac

SEQ ID NO: 297 - RNA, 19 nt, Artificial Sequence
  Description of Artificial Sequence:  Target Sequence/siNA sense region
caguaauaaaacuguuggc

SEQ ID NO: 298 - RNA, 19 nt, Artificial Sequence
  Description of Artificial Sequence:  Target Sequence/siNA sense region
cgagcuuggugaugucaga

SEQ ID NO: 299 - RNA, 19 nt, Artificial Sequence
  Description of Artificial Sequence:  Target Sequence/siNA sense region
agaaacuaugacccaucuu

SEQ ID NO: 300 - RNA, 19 nt, Artificial Sequence
  Description of Artificial Sequence:  Target Sequence/siNA sense region
ucuacagcaugcuaauuug

SEQ ID NO: 301 - RNA, 19 nt, Artificial Sequence
  Description of Artificial Sequence:  Target Sequence/siNA sense region
ggaaucugcaaagcgaguu

SEQ ID NO: 302 - RNA, 19 nt, Artificial Sequence
  Description of Artificial Sequence:  Target Sequence/siNA sense region
ucuuaaugugguguguaaa

SEQ ID NO: 303 - RNA, 19 nt, Artificial Sequence
  Description of Artificial Sequence:  Target Sequence/siNA sense region
acauuguggucagaaaacu

SEQ ID NO: 304 - RNA, 19 nt, Artificial Sequence
  Description of Artificial Sequence:  Target Sequence/siNA sense region
uacuaccuuaacgggugua

SEQ ID NO: 305 - RNA, 19 nt, Artificial Sequence
  Description of Artificial Sequence:  Target Sequence/siNA sense region
agaagcugugauguauaug

SEQ ID NO: 306 - RNA, 19 nt, Artificial Sequence
  Description of Artificial Sequence:  Target Sequence/siNA sense region
ggguacucuaucuuaugau

SEQ ID NO: 307 - RNA, 19 nt, Artificial Sequence
  Description of Artificial Sequence:  Target Sequence/siNA sense region
uaaucuuaagacagguguu

SEQ ID NO: 308 - RNA, 19 nt, Artificial Sequence
  Description of Artificial Sequence:  Target Sequence/siNA sense region
uuccauuccaugugugugu

SEQ ID NO: 309 - RNA, 19 nt, Artificial Sequence
  Description of Artificial Sequence:  Target Sequence/siNA sense region
uggucgugaugcuacacaa

SEQ ID NO: 310 - RNA, 19 nt, Artificial Sequence
  Description of Artificial Sequence:  Target Sequence/siNA sense region
auaucuaguacaacaagag

SEQ ID NO: 311 - RNA, 19 nt, Artificial Sequence
  Description of Artificial Sequence:  Target Sequence/siNA sense region
gucuucuuuuguuaugaug

SEQ ID NO: 312 - RNA, 19 nt, Artificial Sequence
  Description of Artificial Sequence:  Target Sequence/siNA sense region
gucugcaccaccugcugag

SEQ ID NO: 313 - RNA, 19 nt, Artificial Sequence
  Description of Artificial Sequence:  Target Sequence/siNA sense region
guauaaauuacagcaaggu

SEQ ID NO: 314 - RNA, 19 nt, Artificial Sequence
  Description of Artificial Sequence:  Target Sequence/siNA sense region
uacauucuuaugugcgaau

SEQ ID NO: 315 - RNA, 19 nt, Artificial Sequence
  Description of Artificial Sequence:  Target Sequence/siNA sense region
ugaguacacugguaacuau

SEQ ID NO: 316 - RNA, 19 nt, Artificial Sequence
  Description of Artificial Sequence:  Target Sequence/siNA sense region
ucaguguggucauuacacu

SEQ ID NO: 317 - RNA, 19 nt, Artificial Sequence
  Description of Artificial Sequence:  Target Sequence/siNA sense region
ucauauaacugcuaaggag

SEQ ID NO: 318 - RNA, 19 nt, Artificial Sequence
  Description of Artificial Sequence:  Target Sequence/siNA sense region
gacccucuaucguauugac

SEQ ID NO: 319 - RNA, 19 nt, Artificial Sequence
  Description of Artificial Sequence:  Target Sequence/siNA sense region
cggagcucaccuuacaaag

SEQ ID NO: 320 - RNA, 19 nt, Artificial Sequence
  Description of Artificial Sequence:  Target Sequence/siNA sense region
gaugucagaguacaaagga

SEQ ID NO: 321 - RNA, 19 nt, Artificial Sequence
  Description of Artificial Sequence:  Target Sequence/siNA sense region
accagugacugauguuuuc

SEQ ID NO: 322 - RNA, 19 nt, Artificial Sequence
  Description of Artificial Sequence:  Target Sequence/siNA sense region
cuacaaggaaacaucuuac

SEQ ID NO: 323 - RNA, 19 nt, Artificial Sequence
  Description of Artificial Sequence:  Target Sequence/siNA sense region
cacuacaaccaucaagccu

SEQ ID NO: 324 - RNA, 19 nt, Artificial Sequence
  Description of Artificial Sequence:  Target Sequence/siNA sense region
ugugucguauaaacucgau

SEQ ID NO: 325 - RNA, 19 nt, Artificial Sequence
  Description of Artificial Sequence:  Target Sequence/siNA sense region
uggaguuacuuacacagag

SEQ ID NO: 326 - RNA, 19 nt, Artificial Sequence
  Description of Artificial Sequence:  Target Sequence/siNA sense region
gauugaaccaaaauuggau

SEQ ID NO: 327 - RNA, 19 nt, Artificial Sequence
  Description of Artificial Sequence:  Target Sequence/siNA sense region
uggguauuauaaaaaggau

SEQ ID NO: 328 - RNA, 19 nt, Artificial Sequence
  Description of Artificial Sequence:  Target Sequence/siNA sense region
uaaugcuuacuauacagag

SEQ ID NO: 329 - RNA, 19 nt, Artificial Sequence
  Description of Artificial Sequence:  Target Sequence/siNA sense region
gcagccuauagaccuugua

SEQ ID NO: 330 - RNA, 19 nt, Artificial Sequence
  Description of Artificial Sequence:  Target Sequence/siNA sense region
accaacucaaccauuacca

SEQ ID NO: 331 - RNA, 19 nt, Artificial Sequence
  Description of Artificial Sequence:  Target Sequence/siNA sense region
aaaugcgaguuuugauaau

SEQ ID NO: 332 - RNA, 19 nt, Artificial Sequence
  Description of Artificial Sequence:  Target Sequence/siNA sense region
uuucaaacucacauguucu

SEQ ID NO: 333 - RNA, 19 nt, Artificial Sequence
  Description of Artificial Sequence:  Target Sequence/siNA sense region
uaacacaaaauuugcugau

SEQ ID NO: 334 - RNA, 19 nt, Artificial Sequence
  Description of Artificial Sequence:  Target Sequence/siNA sense region
ugauuuaaaucaaaugaca

SEQ ID NO: 335 - RNA, 19 nt, Artificial Sequence
  Description of Artificial Sequence:  Target Sequence/siNA sense region
aggcuucacaaagccagcu

SEQ ID NO: 336 - RNA, 19 nt, Artificial Sequence
  Description of Artificial Sequence:  Target Sequence/siNA sense region
uucacgagagcuaucuguc

SEQ ID NO: 337 - RNA, 19 nt, Artificial Sequence
  Description of Artificial Sequence:  Target Sequence/siNA sense region
cacauucuucccagacuug

SEQ ID NO: 338 - RNA, 19 nt, Artificial Sequence
  Description of Artificial Sequence:  Target Sequence/siNA sense region
gaauggcgauguaguggcu

SEQ ID NO: 339 - RNA, 19 nt, Artificial Sequence
  Description of Artificial Sequence:  Target Sequence/siNA sense region
uauugacuauagacacuau

SEQ ID NO: 340 - RNA, 19 nt, Artificial Sequence
  Description of Artificial Sequence:  Target Sequence/siNA sense region
uucagcgaguuucaagaaa

SEQ ID NO: 341 - RNA, 19 nt, Artificial Sequence
  Description of Artificial Sequence:  Target Sequence/siNA sense region
aggugcuaaauuacugcau

SEQ ID NO: 342 - RNA, 19 nt, Artificial Sequence
  Description of Artificial Sequence:  Target Sequence/siNA sense region
uaagccaauuguuuggcac

SEQ ID NO: 343 - RNA, 19 nt, Artificial Sequence
  Description of Artificial Sequence:  Target Sequence/siNA sense region
cauuaaccaggcuacaacc

SEQ ID NO: 344 - RNA, 19 nt, Artificial Sequence
  Description of Artificial Sequence:  Target Sequence/siNA sense region
caagacaacguucaaacca

SEQ ID NO: 345 - RNA, 19 nt, Artificial Sequence
  Description of Artificial Sequence:  Target Sequence/siNA sense region
aaacacuugguguuuacgu

SEQ ID NO: 346 - RNA, 19 nt, Artificial Sequence
  Description of Artificial Sequence:  Target Sequence/siNA sense region
uugucuuuggaguacaaag

SEQ ID NO: 347 - RNA, 19 nt, Artificial Sequence
  Description of Artificial Sequence:  Target Sequence/siNA sense region
gccaguagauacuucaaau

SEQ ID NO: 348 - RNA, 19 nt, Artificial Sequence
  Description of Artificial Sequence:  Target Sequence/siNA sense region
uucauuugaaguucuggca

SEQ ID NO: 349 - RNA, 19 nt, Artificial Sequence
  Description of Artificial Sequence:  Target Sequence/siNA sense region
aguagaagacacacaagga

SEQ ID NO: 350 - RNA, 19 nt, Artificial Sequence
  Description of Artificial Sequence:  Target Sequence/siNA sense region
aauggacaaucuugcuugu

SEQ ID NO: 351 - RNA, 19 nt, Artificial Sequence
  Description of Artificial Sequence:  Target Sequence/siNA sense region
ugaaagucaacaacccacc

SEQ ID NO: 352 - RNA, 19 nt, Artificial Sequence
  Description of Artificial Sequence:  Target Sequence/siNA sense region
cucugaagaaguaguggaa

SEQ ID NO: 353 - RNA, 19 nt, Artificial Sequence
  Description of Artificial Sequence:  Target Sequence/siNA sense region
aaauccuaccauacagaag

SEQ ID NO: 354 - RNA, 19 nt, Artificial Sequence
  Description of Artificial Sequence:  Target Sequence/siNA sense region
ggaagucauagagugugac

SEQ ID NO: 355 - RNA, 19 nt, Artificial Sequence
  Description of Artificial Sequence:  Target Sequence/siNA sense region
cgugaaaacuaccgaaguu

SEQ ID NO: 356 - RNA, 19 nt, Artificial Sequence
  Description of Artificial Sequence:  Target Sequence/siNA sense region
uguaggcaaugucauacuu

SEQ ID NO: 357 - RNA, 19 nt, Artificial Sequence
  Description of Artificial Sequence:  Target Sequence/siNA sense region
uaaaccaucagaugaaggu

SEQ ID NO: 358 - RNA, 19 nt, Artificial Sequence
  Description of Artificial Sequence:  Target Sequence/siNA sense region
uguuaaaguaacacaagag

SEQ ID NO: 359 - RNA, 19 nt, Artificial Sequence
  Description of Artificial Sequence:  Target Sequence/siNA sense region
guuaggucaugaggaucuu

SEQ ID NO: 360 - RNA, 19 nt, Artificial Sequence
  Description of Artificial Sequence:  Target Sequence/siNA sense region
uauggcugcuuauguggaa

SEQ ID NO: 361 - RNA, 19 nt, Artificial Sequence
  Description of Artificial Sequence:  Target Sequence/siNA sense region
aaacacaagcauuaccauu

SEQ ID NO: 362 - RNA, 19 nt, Artificial Sequence
  Description of Artificial Sequence:  Target Sequence/siNA sense region
uaagaaaccuaaugagcuu

SEQ ID NO: 363 - RNA, 19 nt, Artificial Sequence
  Description of Artificial Sequence:  Target Sequence/siNA sense region
uucacuagccuuagguuua

SEQ ID NO: 364 - RNA, 19 nt, Artificial Sequence
  Description of Artificial Sequence:  Target Sequence/siNA sense region
aaaaacaauugccacucau

SEQ ID NO: 365 - RNA, 19 nt, Artificial Sequence
  Description of Artificial Sequence:  Target Sequence/siNA sense region
ugguauugcugcaauuaau

SEQ ID NO: 366 - RNA, 19 nt, Artificial Sequence
  Description of Artificial Sequence:  Target Sequence/siNA sense region
uaguguuccuuggaguaaa

SEQ ID NO: 367 - RNA, 19 nt, Artificial Sequence
  Description of Artificial Sequence:  Target Sequence/siNA sense region
aauuuuggcuuaugucaaa

SEQ ID NO: 368 - RNA, 19 nt, Artificial Sequence
  Description of Artificial Sequence:  Target Sequence/siNA sense region
accauucuuaggacaagca

SEQ ID NO: 369 - RNA, 19 nt, Artificial Sequence
  Description of Artificial Sequence:  Target Sequence/siNA sense region
agcaauuacaacaucaaau

SEQ ID NO: 370 - RNA, 19 nt, Artificial Sequence
  Description of Artificial Sequence:  Target Sequence/siNA sense region
uugcgcuaagagauuagca

SEQ ID NO: 371 - RNA, 19 nt, Artificial Sequence
  Description of Artificial Sequence:  Target Sequence/siNA sense region
acaacguguguuuaacaau

SEQ ID NO: 372 - RNA, 19 nt, Artificial Sequence
  Description of Artificial Sequence:  Target Sequence/siNA sense region
uuauaugccuuauguguuu

SEQ ID NO: 373 - RNA, 19 nt, Artificial Sequence
  Description of Artificial Sequence:  Target Sequence/siNA sense region
uacauuauuguuccaauug

SEQ ID NO: 374 - RNA, 19 nt, Artificial Sequence
  Description of Artificial Sequence:  Target Sequence/siNA sense region
guguacuuuuacuaaaagu

SEQ ID NO: 375 - RNA, 19 nt, Artificial Sequence
  Description of Artificial Sequence:  Target Sequence/siNA sense region
uaccaauucuagaauuaga

SEQ ID NO: 376 - RNA, 19 nt, Artificial Sequence
  Description of Artificial Sequence:  Target Sequence/siNA sense region
agcuucacuaccuacaacu

SEQ ID NO: 377 - RNA, 19 nt, Artificial Sequence
  Description of Artificial Sequence:  Target Sequence/siNA sense region
uauugcuaaaaauaguguu

SEQ ID NO: 378 - RNA, 19 nt, Artificial Sequence
  Description of Artificial Sequence:  Target Sequence/siNA sense region
uaagaguguugcuaaauua

SEQ ID NO: 379 - RNA, 19 nt, Artificial Sequence
  Description of Artificial Sequence:  Target Sequence/siNA sense region
auguuuggaugccggcauu

SEQ ID NO: 380 - RNA, 19 nt, Artificial Sequence
  Description of Artificial Sequence:  Target Sequence/siNA sense region
uaauuaugugaagucaccc

SEQ ID NO: 381 - RNA, 19 nt, Artificial Sequence
  Description of Artificial Sequence:  Target Sequence/siNA sense region
caaauuuucuaaauuguuc

SEQ ID NO: 382 - RNA, 19 nt, Artificial Sequence
  Description of Artificial Sequence:  Target Sequence/siNA sense region
cacaaucgcuauguggcua

SEQ ID NO: 383 - RNA, 19 nt, Artificial Sequence
  Description of Artificial Sequence:  Target Sequence/siNA sense region
auuguuguuaaguauuugc

SEQ ID NO: 384 - RNA, 19 nt, Artificial Sequence
  Description of Artificial Sequence:  Target Sequence/siNA sense region
cuuagguucucuaaucugu

SEQ ID NO: 385 - RNA, 19 nt, Artificial Sequence
  Description of Artificial Sequence:  Target Sequence/siNA sense region
uguaacugcugcuuuuggu

SEQ ID NO: 386 - RNA, 19 nt, Artificial Sequence
  Description of Artificial Sequence:  Target Sequence/siNA sense region
uguacucuuaucuaauuuu

SEQ ID NO: 387 - RNA, 19 nt, Artificial Sequence
  Description of Artificial Sequence:  Target Sequence/siNA sense region
uggugcuccuucuuauugu

SEQ ID NO: 388 - RNA, 19 nt, Artificial Sequence
  Description of Artificial Sequence:  Target Sequence/siNA sense region
uaauggcguuagagaauug

SEQ ID NO: 389 - RNA, 19 nt, Artificial Sequence
  Description of Artificial Sequence:  Target Sequence/siNA sense region
guaucuuaauucgucuaac

SEQ ID NO: 390 - RNA, 19 nt, Artificial Sequence
  Description of Artificial Sequence:  Target Sequence/siNA sense region
cguuacuacuauggauuuc

SEQ ID NO: 391 - RNA, 19 nt, Artificial Sequence
  Description of Artificial Sequence:  Target Sequence/siNA sense region
cugugaagguucuuuuccu

SEQ ID NO: 392 - RNA, 19 nt, Artificial Sequence
  Description of Artificial Sequence:  Target Sequence/siNA sense region
uugcagcauuuguuuaagu

SEQ ID NO: 393 - RNA, 19 nt, Artificial Sequence
  Description of Artificial Sequence:  Target Sequence/siNA sense region
uggauuagacucccuugau

SEQ ID NO: 394 - RNA, 19 nt, Artificial Sequence
  Description of Artificial Sequence:  Target Sequence/siNA sense region
uucuuauccagcucuugaa

SEQ ID NO: 395 - RNA, 19 nt, Artificial Sequence
  Description of Artificial Sequence:  Target Sequence/siNA sense region
aaccauucaggugacgauu

SEQ ID NO: 396 - RNA, 19 nt, Artificial Sequence
  Description of Artificial Sequence:  Target Sequence/siNA sense region
uucaucguacaagcuagac

SEQ ID NO: 397 - RNA, 19 nt, Artificial Sequence
  Description of Artificial Sequence:  Target Sequence/siNA sense region
cuugacaauuuuaggucug

SEQ ID NO: 398 - RNA, 19 nt, Artificial Sequence
  Description of Artificial Sequence:  Target Sequence/siNA sense region
ggccgcugaguggguuuug

SEQ ID NO: 399 - RNA, 19 nt, Artificial Sequence
  Description of Artificial Sequence:  Target Sequence/siNA sense region
ggcauauauguuguucaca

SEQ ID NO: 400 - RNA, 19 nt, Artificial Sequence
  Description of Artificial Sequence:  Target Sequence/siNA sense region
aaaauucuuuuauuuauua

SEQ ID NO: 401 - RNA, 19 nt, Artificial Sequence
  Description of Artificial Sequence:  Target Sequence/siNA sense region
aggucuuucagcuauaaug

SEQ ID NO: 402 - RNA, 19 nt, Artificial Sequence
  Description of Artificial Sequence:  Target Sequence/siNA sense region
gcagguguucuuuggcuau

SEQ ID NO: 403 - RNA, 19 nt, Artificial Sequence
  Description of Artificial Sequence:  Target Sequence/siNA sense region
uuuugcuagucauuucauc

SEQ ID NO: 404 - RNA, 19 nt, Artificial Sequence
  Description of Artificial Sequence:  Target Sequence/siNA sense region
cagcaauucuuggcucaug

SEQ ID NO: 405 - RNA, 19 nt, Artificial Sequence
  Description of Artificial Sequence:  Target Sequence/siNA sense region
gugguuuaucauuaguauu

SEQ ID NO: 406 - RNA, 19 nt, Artificial Sequence
  Description of Artificial Sequence:  Target Sequence/siNA sense region
uguacaaauggcacccguu

SEQ ID NO: 407 - RNA, 19 nt, Artificial Sequence
  Description of Artificial Sequence:  Target Sequence/siNA sense region
uucugcaaugguuaggaug

SEQ ID NO: 408 - RNA, 19 nt, Artificial Sequence
  Description of Artificial Sequence:  Target Sequence/siNA sense region
guacaucuucuuugcuucu

SEQ ID NO: 409 - RNA, 19 nt, Artificial Sequence
  Description of Artificial Sequence:  Target Sequence/siNA sense region
uuucuacuacauauggaag

SEQ ID NO: 410 - RNA, 19 nt, Artificial Sequence
  Description of Artificial Sequence:  Target Sequence/siNA sense region
gagcuauguucauaucaug

SEQ ID NO: 411 - RNA, 19 nt, Artificial Sequence
  Description of Artificial Sequence:  Target Sequence/siNA sense region
ggaugguugcaccucuucg

SEQ ID NO: 412 - RNA, 19 nt, Artificial Sequence
  Description of Artificial Sequence:  Target Sequence/siNA sense region
gacuugcaugaugugcuau

SEQ ID NO: 413 - RNA, 19 nt, Artificial Sequence
  Description of Artificial Sequence:  Target Sequence/siNA sense region
uaagcgcaaucgugccaca

SEQ ID NO: 414 - RNA, 19 nt, Artificial Sequence
  Description of Artificial Sequence:  Target Sequence/siNA sense region
acgcguugaguguacaacu

SEQ ID NO: 415 - RNA, 19 nt, Artificial Sequence
  Description of Artificial Sequence:  Target Sequence/siNA sense region
uauuguuaauggcaugaag

SEQ ID NO: 416 - RNA, 19 nt, Artificial Sequence
  Description of Artificial Sequence:  Target Sequence/siNA sense region
gagaucuuucuaugucuau

SEQ ID NO: 417 - RNA, 19 nt, Artificial Sequence
  Description of Artificial Sequence:  Target Sequence/siNA sense region
ugcaaauggaggccguggc

SEQ ID NO: 418 - RNA, 19 nt, Artificial Sequence
  Description of Artificial Sequence:  Target Sequence/siNA sense region
cuucugcaagacucacaau

SEQ ID NO: 419 - RNA, 19 nt, Artificial Sequence
  Description of Artificial Sequence:  Target Sequence/siNA sense region
uuggaauugucucaauugu

SEQ ID NO: 420 - RNA, 19 nt, Artificial Sequence
  Description of Artificial Sequence:  Target Sequence/siNA sense region
ugacacauuuugcacuggu

SEQ ID NO: 421 - RNA, 19 nt, Artificial Sequence
  Description of Artificial Sequence:  Target Sequence/siNA sense region
uaguacauucauuagugau

SEQ ID NO: 422 - RNA, 19 nt, Artificial Sequence
  Description of Artificial Sequence:  Target Sequence/siNA sense region
ugaaguugcucgugauuug

SEQ ID NO: 423 - RNA, 19 nt, Artificial Sequence
  Description of Artificial Sequence:  Target Sequence/siNA sense region
gucacuccaguuuaaaaga

SEQ ID NO: 424 - RNA, 19 nt, Artificial Sequence
  Description of Artificial Sequence:  Target Sequence/siNA sense region
accaaucaacccuacugac

SEQ ID NO: 425 - RNA, 19 nt, Artificial Sequence
  Description of Artificial Sequence:  Target Sequence/siNA sense region
ccagucaucguauauuguu

SEQ ID NO: 426 - RNA, 19 nt, Artificial Sequence
  Description of Artificial Sequence:  Target Sequence/siNA sense region
ugauaguguugcugugaaa

SEQ ID NO: 427 - RNA, 19 nt, Artificial Sequence
  Description of Artificial Sequence:  Target Sequence/siNA sense region
aaauggcgcgcuucaccuc

SEQ ID NO: 428 - RNA, 19 nt, Artificial Sequence
  Description of Artificial Sequence:  Target Sequence/siNA sense region
cuacuuugacaaggcuggu

SEQ ID NO: 429 - RNA, 19 nt, Artificial Sequence
  Description of Artificial Sequence:  Target Sequence/siNA sense region
ucaaaagaccuaugagaga

SEQ ID NO: 430 - RNA, 19 nt, Artificial Sequence
  Description of Artificial Sequence:  Target Sequence/siNA sense region
acauccgcucucccauuuu

SEQ ID NO: 431 - RNA, 19 nt, Artificial Sequence
  Description of Artificial Sequence:  Target Sequence/siNA sense region
ugucaauuuagacaauuug

SEQ ID NO: 432 - RNA, 19 nt, Artificial Sequence
  Description of Artificial Sequence:  Target Sequence/siNA sense region
gagagcuaacaacacuaaa

SEQ ID NO: 433 - RNA, 19 nt, Artificial Sequence
  Description of Artificial Sequence:  Target Sequence/siNA sense region
agguucacugccuauuaau

SEQ ID NO: 434 - RNA, 19 nt, Artificial Sequence
  Description of Artificial Sequence:  Target Sequence/siNA sense region
ugucauaguuuuugauggc

SEQ ID NO: 435 - RNA, 19 nt, Artificial Sequence
  Description of Artificial Sequence:  Target Sequence/siNA sense region
caaguccaaaugcgacgag

SEQ ID NO: 436 - RNA, 19 nt, Artificial Sequence
  Description of Artificial Sequence:  Target Sequence/siNA sense region
gucugcuucuaagucugcu

SEQ ID NO: 437 - RNA, 19 nt, Artificial Sequence
  Description of Artificial Sequence:  Target Sequence/siNA sense region
uucuguguacuacagucag

SEQ ID NO: 438 - RNA, 19 nt, Artificial Sequence
  Description of Artificial Sequence:  Target Sequence/siNA sense region
gcugaugugccaaccuauu

SEQ ID NO: 439 - RNA, 19 nt, Artificial Sequence
  Description of Artificial Sequence:  Target Sequence/siNA sense region
ucuguugcuugaccaagcu

SEQ ID NO: 440 - RNA, 19 nt, Artificial Sequence
  Description of Artificial Sequence:  Target Sequence/siNA sense region
ucuuguaucagacguugga

SEQ ID NO: 441 - RNA, 19 nt, Artificial Sequence
  Description of Artificial Sequence:  Target Sequence/siNA sense region
agauaguacugaaguuucc

SEQ ID NO: 442 - RNA, 19 nt, Artificial Sequence
  Description of Artificial Sequence:  Target Sequence/siNA sense region
cguuaagauguuugaugcu

SEQ ID NO: 443 - RNA, 19 nt, Artificial Sequence
  Description of Artificial Sequence:  Target Sequence/siNA sense region
uuaugucgacaccuuuuca

SEQ ID NO: 444 - RNA, 19 nt, Artificial Sequence
  Description of Artificial Sequence:  Target Sequence/siNA sense region
agcaacuuuuaguguuccu

SEQ ID NO: 445 - RNA, 19 nt, Artificial Sequence
  Description of Artificial Sequence:  Target Sequence/siNA sense region
uauggaaaaacuuaaggca

SEQ ID NO: 446 - RNA, 19 nt, Artificial Sequence
  Description of Artificial Sequence:  Target Sequence/siNA sense region
acuuguugcuacagcucac

SEQ ID NO: 447 - RNA, 19 nt, Artificial Sequence
  Description of Artificial Sequence:  Target Sequence/siNA sense region
cagcgaguuagcaaagggu

SEQ ID NO: 448 - RNA, 19 nt, Artificial Sequence
  Description of Artificial Sequence:  Target Sequence/siNA sense region
uguagcuuuagaugguguc

SEQ ID NO: 449 - RNA, 19 nt, Artificial Sequence
  Description of Artificial Sequence:  Target Sequence/siNA sense region
ccuuucuacauucguguca

SEQ ID NO: 450 - RNA, 19 nt, Artificial Sequence
  Description of Artificial Sequence:  Target Sequence/siNA sense region
agcugcccgacaagguguu

SEQ ID NO: 451 - RNA, 19 nt, Artificial Sequence
  Description of Artificial Sequence:  Target Sequence/siNA sense region
uguugauaccgauguugac

SEQ ID NO: 452 - RNA, 19 nt, Artificial Sequence
  Description of Artificial Sequence:  Target Sequence/siNA sense region
cacaaaggauguuauugaa

SEQ ID NO: 453 - RNA, 19 nt, Artificial Sequence
  Description of Artificial Sequence:  Target Sequence/siNA sense region
augucucaaacuuucacau

SEQ ID NO: 454 - RNA, 19 nt, Artificial Sequence
  Description of Artificial Sequence:  Target Sequence/siNA sense region
ucacucugacuuagaagug

SEQ ID NO: 455 - RNA, 19 nt, Artificial Sequence
  Description of Artificial Sequence:  Target Sequence/siNA sense region
gacaggugacaguuguaac

SEQ ID NO: 456 - RNA, 19 nt, Artificial Sequence
  Description of Artificial Sequence:  Target Sequence/siNA sense region
caauuucaugcucaccuau

SEQ ID NO: 457 - RNA, 19 nt, Artificial Sequence
  Description of Artificial Sequence:  Target Sequence/siNA sense region
uaauaagguugaaaacaug

SEQ ID NO: 458 - RNA, 19 nt, Artificial Sequence
  Description of Artificial Sequence:  Target Sequence/siNA sense region
gacgcccagagaucuuggc

SEQ ID NO: 459 - RNA, 19 nt, Artificial Sequence
  Description of Artificial Sequence:  Target Sequence/siNA sense region
cgcauguauugacuguaau

SEQ ID NO: 460 - RNA, 19 nt, Artificial Sequence
  Description of Artificial Sequence:  Target Sequence/siNA sense region
ugcaaggcauaucaaugcc

SEQ ID NO: 461 - RNA, 19 nt, Artificial Sequence
  Description of Artificial Sequence:  Target Sequence/siNA sense region
ccaaguagcaaaaagucac

SEQ ID NO: 462 - RNA, 19 nt, Artificial Sequence
  Description of Artificial Sequence:  Target Sequence/siNA sense region
caauguuucacucaucugg

SEQ ID NO: 463 - RNA, 19 nt, Artificial Sequence
  Description of Artificial Sequence:  Target Sequence/siNA sense region
gaauguaaaagacuacaug

SEQ ID NO: 464 - RNA, 19 nt, Artificial Sequence
  Description of Artificial Sequence:  Target Sequence/siNA sense region
gucuuuaucugaacagcug

SEQ ID NO: 465 - RNA, 19 nt, Artificial Sequence
  Description of Artificial Sequence:  Target Sequence/siNA sense region
gcguaaacaaauucguagu

SEQ ID NO: 466 - RNA, 19 nt, Artificial Sequence
  Description of Artificial Sequence:  Target Sequence/siNA sense region
ugcugccaagaagaacaac

SEQ ID NO: 467 - RNA, 19 nt, Artificial Sequence
  Description of Artificial Sequence:  Target Sequence/siNA sense region
cauaccuuuuagacuaacu

SEQ ID NO: 468 - RNA, 19 nt, Artificial Sequence
  Description of Artificial Sequence:  Target Sequence/siNA sense region
uugugcuacaacuagacag

SEQ ID NO: 469 - RNA, 19 nt, Artificial Sequence
  Description of Artificial Sequence:  Target Sequence/siNA sense region
gguugucaaugucauaacu

SEQ ID NO: 470 - RNA, 19 nt, Artificial Sequence
  Description of Artificial Sequence:  Target Sequence/siNA sense region
uacuaaaaucucacucaag

SEQ ID NO: 471 - RNA, 19 nt, Artificial Sequence
  Description of Artificial Sequence:  Target Sequence/siNA sense region
gggugguaagauuguuagu

SEQ ID NO: 472 - RNA, 19 nt, Artificial Sequence
  Description of Artificial Sequence:  Target Sequence/siNA sense region
uacuuguuuuaaacuuaug

SEQ ID NO: 473 - RNA, 19 nt, Artificial Sequence
  Description of Artificial Sequence:  Target Sequence/siNA sense region
gcuuaaggccacauuauug

SEQ ID NO: 474 - RNA, 19 nt, Artificial Sequence
  Description of Artificial Sequence:  Target Sequence/siNA sense region
gugcguucuugcugcauug

SEQ ID NO: 475 - RNA, 19 nt, Artificial Sequence
  Description of Artificial Sequence:  Target Sequence/siNA sense region
gguuuguuauaucguuaug

SEQ ID NO: 476 - RNA, 19 nt, Artificial Sequence
  Description of Artificial Sequence:  Target Sequence/siNA sense region
gccaguacauacauuguca

SEQ ID NO: 477 - RNA, 19 nt, Artificial Sequence
  Description of Artificial Sequence:  Target Sequence/siNA sense region
aauccaugaugguuacaca

SEQ ID NO: 478 - RNA, 19 nt, Artificial Sequence
  Description of Artificial Sequence:  Target Sequence/siNA sense region
aaaugaaaucauugguuac

SEQ ID NO: 479 - RNA, 19 nt, Artificial Sequence
  Description of Artificial Sequence:  Target Sequence/siNA sense region
caaagccauucaggauggu

SEQ ID NO: 480 - RNA, 19 nt, Artificial Sequence
  Description of Artificial Sequence:  Target Sequence/siNA sense region
ugucacucgugacaucauu

SEQ ID NO: 481 - RNA, 19 nt, Artificial Sequence
  Description of Artificial Sequence:  Target Sequence/siNA sense region
uucuacugaugauuguuuu

SEQ ID NO: 482 - RNA, 19 nt, Artificial Sequence
  Description of Artificial Sequence:  Target Sequence/siNA sense region
ugcaaauaaacaugcuggu

SEQ ID NO: 483 - RNA, 19 nt, Artificial Sequence
  Description of Artificial Sequence:  Target Sequence/siNA sense region
uuuugacgcaugguuuagc

SEQ ID NO: 484 - RNA, 19 nt, Artificial Sequence
  Description of Artificial Sequence:  Target Sequence/siNA sense region
ccagcguggugguucauac

SEQ ID NO: 485 - RNA, 19 nt, Artificial Sequence
  Description of Artificial Sequence:  Target Sequence/siNA sense region
caaaaaugacaaaagcugc

SEQ ID NO: 486 - RNA, 19 nt, Artificial Sequence
  Description of Artificial Sequence:  Target Sequence/siNA sense region
cccuguaguagcugcuauc

SEQ ID NO: 487 - RNA, 19 nt, Artificial Sequence
  Description of Artificial Sequence:  Target Sequence/siNA sense region
cauuacaagagagauuggu

SEQ ID NO: 488 - RNA, 19 nt, Artificial Sequence
  Description of Artificial Sequence:  Target Sequence/siNA sense region
uuucauagugccuggcuua

SEQ ID NO: 489 - RNA, 19 nt, Artificial Sequence
  Description of Artificial Sequence:  Target Sequence/siNA sense region
accggguacugugcugaga

SEQ ID NO: 490 - RNA, 19 nt, Artificial Sequence
  Description of Artificial Sequence:  Target Sequence/siNA sense region
agcaaucaauggugacuuc

SEQ ID NO: 491 - RNA, 19 nt, Artificial Sequence
  Description of Artificial Sequence:  Target Sequence/siNA sense region
cuugcauuuucuaccucgu

SEQ ID NO: 492 - RNA, 19 nt, Artificial Sequence
  Description of Artificial Sequence:  Target Sequence/siNA sense region
uguuuuuagugcuguuggc

SEQ ID NO: 493 - RNA, 19 nt, Artificial Sequence
  Description of Artificial Sequence:  Target Sequence/siNA sense region
caacauuugcuacacaccu

SEQ ID NO: 494 - RNA, 19 nt, Artificial Sequence
  Description of Artificial Sequence:  Target Sequence/siNA sense region
uuccaaacucauugaguau

SEQ ID NO: 495 - RNA, 19 nt, Artificial Sequence
  Description of Artificial Sequence:  Target Sequence/siNA sense region
uagugauuuugcuaccucu

SEQ ID NO: 496 - RNA, 19 nt, Artificial Sequence
  Description of Artificial Sequence:  Target Sequence/siNA sense region
ugcuugcguucuugcugcu

SEQ ID NO: 497 - RNA, 19 nt, Artificial Sequence
  Description of Artificial Sequence:  Target Sequence/siNA sense region
ugaguguacaauuuuuaag

SEQ ID NO: 498 - RNA, 19 nt, Artificial Sequence
  Description of Artificial Sequence:  Target Sequence/siNA sense region
ggaugcuaugggcaaaccu

SEQ ID NO: 499 - RNA, 19 nt, Artificial Sequence
  Description of Artificial Sequence:  Target Sequence/siNA sense region
ugugccauauuguuaugac

SEQ ID NO: 500 - RNA, 19 nt, Artificial Sequence
  Description of Artificial Sequence:  Target Sequence/siNA sense region
cacuaauuugcuagagggu

SEQ ID NO: 501 - RNA, 19 nt, Artificial Sequence
  Description of Artificial Sequence:  Target Sequence/siNA sense region
uucuauuucuuauagugag

SEQ ID NO: 502 - RNA, 19 nt, Artificial Sequence
  Description of Artificial Sequence:  Target Sequence/siNA sense region
gcuucguccagacacucgu

SEQ ID NO: 503 - RNA, 19 nt, Artificial Sequence
  Description of Artificial Sequence:  Target Sequence/siNA sense region
uuaugugcuuauggauggu

SEQ ID NO: 504 - RNA, 19 nt, Artificial Sequence
  Description of Artificial Sequence:  Target Sequence/siNA sense region
uuccaucauacaguuuccu

SEQ ID NO: 505 - RNA, 19 nt, Artificial Sequence
  Description of Artificial Sequence:  Target Sequence/siNA sense region
uaacacuuaccuggagggu

SEQ ID NO: 506 - RNA, 19 nt, Artificial Sequence
  Description of Artificial Sequence:  Target Sequence/siNA sense region
uucuguuagaguaguaaca

SEQ ID NO: 507 - RNA, 19 nt, Artificial Sequence
  Description of Artificial Sequence:  Target Sequence/siNA sense region
aacuuuugaugcugaguac

SEQ ID NO: 508 - RNA, 19 nt, Artificial Sequence
  Description of Artificial Sequence:  Target Sequence/siNA sense region
cuguagacaugguacaugc

SEQ ID NO: 509 - RNA, 19 nt, Artificial Sequence
  Description of Artificial Sequence:  Target Sequence/siNA sense region
cgaaaggucagaaguaggu

SEQ ID NO: 510 - RNA, 19 nt, Artificial Sequence
  Description of Artificial Sequence:  Target Sequence/siNA sense region
uauuugccuaucuaccagu

SEQ ID NO: 511 - RNA, 19 nt, Artificial Sequence
  Description of Artificial Sequence:  Target Sequence/siNA sense region
ugguagauggguucuuaau

SEQ ID NO: 512 - RNA, 19 nt, Artificial Sequence
  Description of Artificial Sequence:  Target Sequence/siNA sense region
uaaugagcauuacagagcu

SEQ ID NO: 513 - RNA, 19 nt, Artificial Sequence
  Description of Artificial Sequence:  Target Sequence/siNA sense region
ucuaucaggaguuuucugu

SEQ ID NO: 514 - RNA, 19 nt, Artificial Sequence
  Description of Artificial Sequence:  Target Sequence/siNA sense region
ugguguugaugcgaugaau

SEQ ID NO: 515 - RNA, 19 nt, Artificial Sequence
  Description of Artificial Sequence:  Target Sequence/siNA sense region
ucucauagcuaacaucuuu

SEQ ID NO: 516 - RNA, 19 nt, Artificial Sequence
  Description of Artificial Sequence:  Target Sequence/siNA sense region
uacuccucuugugcaaccu

SEQ ID NO: 517 - RNA, 19 nt, Artificial Sequence
  Description of Artificial Sequence:  Target Sequence/siNA sense region
ugugggugcuuuagaugug

SEQ ID NO: 518 - RNA, 19 nt, Artificial Sequence
  Description of Artificial Sequence:  Target Sequence/siNA sense region
gucugcuucaguaguggcu

SEQ ID NO: 519 - RNA, 19 nt, Artificial Sequence
  Description of Artificial Sequence:  Target Sequence/siNA sense region
uggugguauuauugccaua

SEQ ID NO: 520 - RNA, 19 nt, Artificial Sequence
  Description of Artificial Sequence:  Target Sequence/siNA sense region
auuggugacuugugcugcc

SEQ ID NO: 521 - RNA, 19 nt, Artificial Sequence
  Description of Artificial Sequence:  Target Sequence/siNA sense region
cuacuacuuuaugaaauuc

SEQ ID NO: 522 - RNA, 19 nt, Artificial Sequence
  Description of Artificial Sequence:  Target Sequence/siNA sense region
cagacguguuuuuggugag

SEQ ID NO: 523 - RNA, 19 nt, Artificial Sequence
  Description of Artificial Sequence:  Target Sequence/siNA sense region
guacaaccauguuguugcu

SEQ ID NO: 524 - RNA, 19 nt, Artificial Sequence
  Description of Artificial Sequence:  Target Sequence/siNA sense region
ugcuaaugcacuuuuguuu

SEQ ID NO: 525 - RNA, 19 nt, Artificial Sequence
  Description of Artificial Sequence:  Target Sequence/siNA sense region
uuugaugucuuucacuaua

SEQ ID NO: 526 - RNA, 19 nt, Artificial Sequence
  Description of Artificial Sequence:  Target Sequence/siNA sense region
acucugucugguaccagcu

SEQ ID NO: 527 - RNA, 19 nt, Artificial Sequence
  Description of Artificial Sequence:  Target Sequence/siNA sense region
uuacagcuuucugccggga

SEQ ID NO: 528 - RNA, 19 nt, Artificial Sequence
  Description of Artificial Sequence:  Target Sequence/siNA sense region
agucuacucagucuuuuac

SEQ ID NO: 529 - RNA, 19 nt, Artificial Sequence
  Description of Artificial Sequence:  Target Sequence/siNA sense region
cuuguacuugacauucuau

SEQ ID NO: 530 - RNA, 19 nt, Artificial Sequence
  Description of Artificial Sequence:  Target Sequence/siNA sense region
uuucaccaaugauguuuca

SEQ ID NO: 531 - RNA, 19 nt, Artificial Sequence
  Description of Artificial Sequence:  Target Sequence/siNA sense region
auucuuggcucaccuucaa

SEQ ID NO: 532 - RNA, 19 nt, Artificial Sequence
  Description of Artificial Sequence:  Target Sequence/siNA sense region
augguuugccauguuuucu

SEQ ID NO: 533 - RNA, 19 nt, Artificial Sequence
  Description of Artificial Sequence:  Target Sequence/siNA sense region
uccuauugugccuuuuugg

SEQ ID NO: 534 - RNA, 19 nt, Artificial Sequence
  Description of Artificial Sequence:  Target Sequence/siNA sense region
gauaacagcaaucuaugua

SEQ ID NO: 535 - RNA, 19 nt, Artificial Sequence
  Description of Artificial Sequence:  Target Sequence/siNA sense region
auucuguauuucucugaag

SEQ ID NO: 536 - RNA, 19 nt, Artificial Sequence
  Description of Artificial Sequence:  Target Sequence/siNA sense region
gcacugccauugguucuuu

SEQ ID NO: 537 - RNA, 19 nt, Artificial Sequence
  Description of Artificial Sequence:  Target Sequence/siNA sense region
uaacaacuaucuuaggaaa

SEQ ID NO: 538 - RNA, 19 nt, Artificial Sequence
  Description of Artificial Sequence:  Target Sequence/siNA sense region
aagagucauguuuaaugga

SEQ ID NO: 539 - RNA, 19 nt, Artificial Sequence
  Description of Artificial Sequence:  Target Sequence/siNA sense region
aguuacauuuaguaccuuc

SEQ ID NO: 540 - RNA, 19 nt, Artificial Sequence
  Description of Artificial Sequence:  Target Sequence/siNA sense region
cgaggaggcugcuuugugu

SEQ ID NO: 541 - RNA, 19 nt, Artificial Sequence
  Description of Artificial Sequence:  Target Sequence/siNA sense region
uaccuuuuugcucaacaag

SEQ ID NO: 542 - RNA, 19 nt, Artificial Sequence
  Description of Artificial Sequence:  Target Sequence/siNA sense region
ggaaauguaccuaaaauug

SEQ ID NO: 543 - RNA, 19 nt, Artificial Sequence
  Description of Artificial Sequence:  Target Sequence/siNA sense region
gcguagcgagacacuguug

SEQ ID NO: 544 - RNA, 19 nt, Artificial Sequence
  Description of Artificial Sequence:  Target Sequence/siNA sense region
gccacuuacacaguauaac

SEQ ID NO: 545 - RNA, 19 nt, Artificial Sequence
  Description of Artificial Sequence:  Target Sequence/siNA sense region
cagguaucuugcucuauau

SEQ ID NO: 546 - RNA, 19 nt, Artificial Sequence
  Description of Artificial Sequence:  Target Sequence/siNA sense region
uaacaaguacaaguauuuc

SEQ ID NO: 547 - RNA, 19 nt, Artificial Sequence
  Description of Artificial Sequence:  Target Sequence/siNA sense region
caguggagccuuagauacu

SEQ ID NO: 548 - RNA, 19 nt, Artificial Sequence
  Description of Artificial Sequence:  Target Sequence/siNA sense region
uaccagcuaucgugaagca

SEQ ID NO: 549 - RNA, 19 nt, Artificial Sequence
  Description of Artificial Sequence:  Target Sequence/siNA sense region
agcuugcugccacuuagca

SEQ ID NO: 550 - RNA, 19 nt, Artificial Sequence
  Description of Artificial Sequence:  Target Sequence/siNA sense region
aaaggcucuaaaugacuuu

SEQ ID NO: 551 - RNA, 19 nt, Artificial Sequence
  Description of Artificial Sequence:  Target Sequence/siNA sense region
uagcaacucaggugcugau

SEQ ID NO: 552 - RNA, 19 nt, Artificial Sequence
  Description of Artificial Sequence:  Target Sequence/siNA sense region
uguucucuaccaaccacca

SEQ ID NO: 553 - RNA, 19 nt, Artificial Sequence
  Description of Artificial Sequence:  Target Sequence/siNA sense region
acagacaucaaucacuucu

SEQ ID NO: 554 - RNA, 19 nt, Artificial Sequence
  Description of Artificial Sequence:  Target Sequence/siNA sense region
ugcuguucugcagaguggu

SEQ ID NO: 555 - RNA, 19 nt, Artificial Sequence
  Description of Artificial Sequence:  Target Sequence/siNA sense region
uuuuaggaaaauggcauuc

SEQ ID NO: 556 - RNA, 19 nt, Artificial Sequence
  Description of Artificial Sequence:  Target Sequence/siNA sense region
cccgucaggcaaaguugaa

SEQ ID NO: 557 - RNA, 19 nt, Artificial Sequence
  Description of Artificial Sequence:  Target Sequence/siNA sense region
agggugcaugguacaagua

SEQ ID NO: 558 - RNA, 19 nt, Artificial Sequence
  Description of Artificial Sequence:  Target Sequence/siNA sense region
aaccuguggaacuacaacu

SEQ ID NO: 559 - RNA, 19 nt, Artificial Sequence
  Description of Artificial Sequence:  Target Sequence/siNA sense region
ucuuaauggauugugguug

SEQ ID NO: 560 - RNA, 19 nt, Artificial Sequence
  Description of Artificial Sequence:  Target Sequence/siNA sense region
ggaugacacaguauacugu

SEQ ID NO: 561 - RNA, 19 nt, Artificial Sequence
  Description of Artificial Sequence:  Target Sequence/siNA sense region
uccaagacaugucauuugc

SEQ ID NO: 562 - RNA, 19 nt, Artificial Sequence
  Description of Artificial Sequence:  Target Sequence/siNA sense region
cacagcagaagacaugcuu

SEQ ID NO: 563 - RNA, 19 nt, Artificial Sequence
  Description of Artificial Sequence:  Target Sequence/siNA sense region
uaauccuaacuaugaagau

SEQ ID NO: 564 - RNA, 19 nt, Artificial Sequence
  Description of Artificial Sequence:  Target Sequence/siNA sense region
ucugcucauucgcaaaucc

SEQ ID NO: 565 - RNA, 19 nt, Artificial Sequence
  Description of Artificial Sequence:  Target Sequence/siNA sense region
caaccauagcuuucuuguu

SEQ ID NO: 566 - RNA, 19 nt, Artificial Sequence
  Description of Artificial Sequence:  Target Sequence/siNA sense region
ucaggcuggcaauguucaa

SEQ ID NO: 567 - RNA, 19 nt, Artificial Sequence
  Description of Artificial Sequence:  Target Sequence/siNA sense region
acuucguguuauuggccau

SEQ ID NO: 568 - RNA, 19 nt, Artificial Sequence
  Description of Artificial Sequence:  Target Sequence/siNA sense region
uucuaugcaaaauugucug

SEQ ID NO: 569 - RNA, 19 nt, Artificial Sequence
  Description of Artificial Sequence:  Target Sequence/siNA sense region
gcuuaggcuuaaaguugau

SEQ ID NO: 570 - RNA, 19 nt, Artificial Sequence
  Description of Artificial Sequence:  Target Sequence/siNA sense region
uacuucuaacccuaagaca

SEQ ID NO: 571 - RNA, 19 nt, Artificial Sequence
  Description of Artificial Sequence:  Target Sequence/siNA sense region
acccaaguauaaauuuguc

SEQ ID NO: 572 - RNA, 19 nt, Artificial Sequence
  Description of Artificial Sequence:  Target Sequence/siNA sense region
ccguauccaaccuggucaa

SEQ ID NO: 573 - RNA, 19 nt, Artificial Sequence
  Description of Artificial Sequence:  Target Sequence/siNA sense region
aacauuuucaguucuagca

SEQ ID NO: 574 - RNA, 19 nt, Artificial Sequence
  Description of Artificial Sequence:  Target Sequence/siNA sense region
augcuacaaugguucacca

SEQ ID NO: 575 - RNA, 19 nt, Artificial Sequence
  Description of Artificial Sequence:  Target Sequence/siNA sense region
aucugguguuuaucagugu

SEQ ID NO: 576 - RNA, 19 nt, Artificial Sequence
  Description of Artificial Sequence:  Target Sequence/siNA sense region
ugccaugagaccuaaucau

SEQ ID NO: 577 - RNA, 19 nt, Artificial Sequence
  Description of Artificial Sequence:  Target Sequence/siNA sense region
uaccauuaaagguucuuuc

SEQ ID NO: 578 - RNA, 19 nt, Artificial Sequence
  Description of Artificial Sequence:  Target Sequence/siNA sense region
ccuuaauggaucauguggu

SEQ ID NO: 579 - RNA, 19 nt, Artificial Sequence
  Description of Artificial Sequence:  Target Sequence/siNA sense region
uaguguugguuuuaacauu

SEQ ID NO: 580 - RNA, 19 nt, Artificial Sequence
  Description of Artificial Sequence:  Target Sequence/siNA sense region
ugauuaugauugcgugucu

SEQ ID NO: 581 - RNA, 19 nt, Artificial Sequence
  Description of Artificial Sequence:  Target Sequence/siNA sense region
uuucugcuauaugcaucau

SEQ ID NO: 582 - RNA, 19 nt, Artificial Sequence
  Description of Artificial Sequence:  Target Sequence/siNA sense region
uauggagcuuccaacagga

SEQ ID NO: 583 - RNA, 19 nt, Artificial Sequence
  Description of Artificial Sequence:  Target Sequence/siNA sense region
aguacacgcugguacugac

SEQ ID NO: 584 - RNA, 19 nt, Artificial Sequence
  Description of Artificial Sequence:  Target Sequence/siNA sense region
cuuagaagguaaauucuau

SEQ ID NO: 585 - RNA, 19 nt, Artificial Sequence
  Description of Artificial Sequence:  Target Sequence/siNA sense region
ugguccauuuguugacaga

SEQ ID NO: 586 - RNA, 19 nt, Artificial Sequence
  Description of Artificial Sequence:  Target Sequence/siNA sense region
acaaacugcacaggcugca

SEQ ID NO: 587 - RNA, 19 nt, Artificial Sequence
  Description of Artificial Sequence:  Target Sequence/siNA sense region
agguacagacacaaccaua

SEQ ID NO: 588 - RNA, 19 nt, Artificial Sequence
  Description of Artificial Sequence:  Target Sequence/siNA sense region
aacauuaaauguuuuggca

SEQ ID NO: 589 - RNA, 19 nt, Artificial Sequence
  Description of Artificial Sequence:  Target Sequence/siNA sense region
auggcuguaugcugcuguu

SEQ ID NO: 590 - RNA, 19 nt, Artificial Sequence
  Description of Artificial Sequence:  Target Sequence/siNA sense region
uaucaauggugauaggugg

SEQ ID NO: 591 - RNA, 19 nt, Artificial Sequence
  Description of Artificial Sequence:  Target Sequence/siNA sense region
guuucuuaauagauucacc

SEQ ID NO: 592 - RNA, 19 nt, Artificial Sequence
  Description of Artificial Sequence:  Target Sequence/siNA sense region
cacuacuuugaaugacuuu

SEQ ID NO: 593 - RNA, 19 nt, Artificial Sequence
  Description of Artificial Sequence:  Target Sequence/siNA sense region
uaaccuuguggcaaugaag

SEQ ID NO: 594 - RNA, 19 nt, Artificial Sequence
  Description of Artificial Sequence:  Target Sequence/siNA sense region
guacaacuaugaaccuuug

SEQ ID NO: 595 - RNA, 19 nt, Artificial Sequence
  Description of Artificial Sequence:  Target Sequence/siNA sense region
gacacaagaucauguugac

SEQ ID NO: 596 - RNA, 19 nt, Artificial Sequence
  Description of Artificial Sequence:  Target Sequence/siNA sense region
cauauugggaccucuuucu

SEQ ID NO: 597 - RNA, 19 nt, Artificial Sequence
  Description of Artificial Sequence:  Target Sequence/siNA sense region
ugcucaaacaggaauugcc

SEQ ID NO: 598 - RNA, 19 nt, Artificial Sequence
  Description of Artificial Sequence:  Target Sequence/siNA sense region
cgucuuagauaugugugcu

SEQ ID NO: 599 - RNA, 19 nt, Artificial Sequence
  Description of Artificial Sequence:  Target Sequence/siNA sense region
ugcuuugaaagagcugcug

SEQ ID NO: 600 - RNA, 19 nt, Artificial Sequence
  Description of Artificial Sequence:  Target Sequence/siNA sense region
gcagaaugguaugaauggu

SEQ ID NO: 601 - RNA, 19 nt, Artificial Sequence
  Description of Artificial Sequence:  Target Sequence/siNA sense region
ucguacuauccuugguagc

SEQ ID NO: 602 - RNA, 19 nt, Artificial Sequence
  Description of Artificial Sequence:  Target Sequence/siNA sense region
cacuauuuuagaagaugag

SEQ ID NO: 603 - RNA, 19 nt, Artificial Sequence
  Description of Artificial Sequence:  Target Sequence/siNA sense region
guuuacaccauuugauguu

SEQ ID NO: 604 - RNA, 19 nt, Artificial Sequence
  Description of Artificial Sequence:  Target Sequence/siNA sense region
uguuagacaaugcucuggu

SEQ ID NO: 605 - RNA, 19 nt, Artificial Sequence
  Description of Artificial Sequence:  Target Sequence/siNA sense region
uguuaccuuccaagguaag

SEQ ID NO: 606 - RNA, 19 nt, Artificial Sequence
  Description of Artificial Sequence:  Target Sequence/siNA sense region
guucaagaaaauuguuaag

SEQ ID NO: 607 - RNA, 19 nt, Artificial Sequence
  Description of Artificial Sequence:  Target Sequence/siNA sense region
gggcacucaucauuggaug

SEQ ID NO: 608 - RNA, 19 nt, Artificial Sequence
  Description of Artificial Sequence:  Target Sequence/siNA sense region
gcuuuuaacuuucuugaca

SEQ ID NO: 609 - RNA, 19 nt, Artificial Sequence
  Description of Artificial Sequence:  Target Sequence/siNA sense region
aucacuauugauucuuguu

SEQ ID NO: 610 - RNA, 19 nt, Artificial Sequence
  Description of Artificial Sequence:  Target Sequence/siNA sense region
ucaaaguacacagugguca

SEQ ID NO: 611 - RNA, 19 nt, Artificial Sequence
  Description of Artificial Sequence:  Target Sequence/siNA sense region
acuguuuuucuuuguuuac

SEQ ID NO: 612 - RNA, 19 nt, Artificial Sequence
  Description of Artificial Sequence:  Target Sequence/siNA sense region
cgagaaugcuuucuugcca

SEQ ID NO: 613 - RNA, 19 nt, Artificial Sequence
  Description of Artificial Sequence:  Target Sequence/siNA sense region
auuuacucuugguauuaug

SEQ ID NO: 614 - RNA, 19 nt, Artificial Sequence
  Description of Artificial Sequence:  Target Sequence/siNA sense region
ggcaauugcugcaugugcu

SEQ ID NO: 615 - RNA, 19 nt, Artificial Sequence
  Description of Artificial Sequence:  Target Sequence/siNA sense region
uaugcugcuuguuaagcau

SEQ ID NO: 616 - RNA, 19 nt, Artificial Sequence
  Description of Artificial Sequence:  Target Sequence/siNA sense region
uaagcacgcauucuugugc

SEQ ID NO: 617 - RNA, 19 nt, Artificial Sequence
  Description of Artificial Sequence:  Target Sequence/siNA sense region
cuuguuucuguuaccuucu

SEQ ID NO: 618 - RNA, 19 nt, Artificial Sequence
  Description of Artificial Sequence:  Target Sequence/siNA sense region
ucuugcaacaguugcuuac

SEQ ID NO: 619 - RNA, 19 nt, Artificial Sequence
  Description of Artificial Sequence:  Target Sequence/siNA sense region
cuuuaauauggucuacaug

SEQ ID NO: 620 - RNA, 19 nt, Artificial Sequence
  Description of Artificial Sequence:  Target Sequence/siNA sense region
gccugcuagcugggugaug

SEQ ID NO: 621 - RNA, 19 nt, Artificial Sequence
  Description of Artificial Sequence:  Target Sequence/siNA sense region
gcguaucaugacauggcuu

SEQ ID NO: 622 - RNA, 19 nt, Artificial Sequence
  Description of Artificial Sequence:  Target Sequence/siNA sense region
ugaauuggcugacacuagc

SEQ ID NO: 623 - RNA, 19 nt, Artificial Sequence
  Description of Artificial Sequence:  Target Sequence/siNA sense region
cuugucugguuauaggcuu

SEQ ID NO: 624 - RNA, 19 nt, Artificial Sequence
  Description of Artificial Sequence:  Target Sequence/siNA sense region
uaaggauuguguuauguau

SEQ ID NO: 625 - RNA, 19 nt, Artificial Sequence
  Description of Artificial Sequence:  Target Sequence/siNA sense region
ugcuucagcuuuaguuuug

SEQ ID NO: 626 - RNA, 19 nt, Artificial Sequence
  Description of Artificial Sequence:  Target Sequence/siNA sense region
gcuuauucucaugacagcu

SEQ ID NO: 627 - RNA, 19 nt, Artificial Sequence
  Description of Artificial Sequence:  Target Sequence/siNA sense region
ucgcacuguuuaugaugau

SEQ ID NO: 628 - RNA, 19 nt, Artificial Sequence
  Description of Artificial Sequence:  Target Sequence/siNA sense region
ugcugcuagacguguuugg

SEQ ID NO: 629 - RNA, 19 nt, Artificial Sequence
  Description of Artificial Sequence:  Target Sequence/siNA sense region
gacacugaugaaugucauu

SEQ ID NO: 630 - RNA, 19 nt, Artificial Sequence
  Description of Artificial Sequence:  Target Sequence/siNA sense region
uacacuuguuuacaaaguc

SEQ ID NO: 631 - RNA, 19 nt, Artificial Sequence
  Description of Artificial Sequence:  Target Sequence/siNA sense region
cuacuaugguaaugcuuua

SEQ ID NO: 632 - RNA, 19 nt, Artificial Sequence
  Description of Artificial Sequence:  Target Sequence/siNA sense region
agaucaagcuauuuccaug

SEQ ID NO: 633 - RNA, 19 nt, Artificial Sequence
  Description of Artificial Sequence:  Target Sequence/siNA sense region
gugggccuuaguuauuucu

SEQ ID NO: 634 - RNA, 19 nt, Artificial Sequence
  Description of Artificial Sequence:  Target Sequence/siNA sense region
uguaaccucuaacuauucu

SEQ ID NO: 635 - RNA, 19 nt, Artificial Sequence
  Description of Artificial Sequence:  Target Sequence/siNA sense region
uggugucguuacgacuauc

SEQ ID NO: 636 - RNA, 19 nt, Artificial Sequence
  Description of Artificial Sequence:  Target Sequence/siNA sense region
cauguuuuuagcuagagcu

SEQ ID NO: 637 - RNA, 19 nt, Artificial Sequence
  Description of Artificial Sequence:  Target Sequence/siNA sense region
uauaguguuuguguguguu

SEQ ID NO: 638 - RNA, 19 nt, Artificial Sequence
  Description of Artificial Sequence:  Target Sequence/siNA sense region
ugaguauuacccauuguua

SEQ ID NO: 639 - RNA, 19 nt, Artificial Sequence
  Description of Artificial Sequence:  Target Sequence/siNA sense region
auuuauuacuggcaacacc

SEQ ID NO: 640 - RNA, 19 nt, Artificial Sequence
  Description of Artificial Sequence:  Target Sequence/siNA sense region
cuuacaguguaucaugcuu

SEQ ID NO: 641 - RNA, 19 nt, Artificial Sequence
  Description of Artificial Sequence:  Target Sequence/siNA sense region
uguuuauuguuucuuaggc

SEQ ID NO: 642 - RNA, 19 nt, Artificial Sequence
  Description of Artificial Sequence:  Target Sequence/siNA sense region
cuauuguugcugcugcuac

SEQ ID NO: 643 - RNA, 19 nt, Artificial Sequence
  Description of Artificial Sequence:  Target Sequence/siNA sense region
cuuuggccuuuucuguuua

SEQ ID NO: 644 - RNA, 19 nt, Artificial Sequence
  Description of Artificial Sequence:  Target Sequence/siNA sense region
acucaaccguuacuucagg

SEQ ID NO: 645 - RNA, 19 nt, Artificial Sequence
  Description of Artificial Sequence:  Target Sequence/siNA sense region
gcuuacucuugguguuuau

SEQ ID NO: 646 - RNA, 19 nt, Artificial Sequence
  Description of Artificial Sequence:  Target Sequence/siNA sense region
ugacuacuuggucucuaca

SEQ ID NO: 647 - RNA, 19 nt, Artificial Sequence
  Description of Artificial Sequence:  Target Sequence/siNA sense region
acaagaauuuagguauaug

SEQ ID NO: 648 - RNA, 19 nt, Artificial Sequence
  Description of Artificial Sequence:  Target Sequence/siNA sense region
gaacucccaggggcuuuug

SEQ ID NO: 649 - RNA, 19 nt, Artificial Sequence
  Description of Artificial Sequence:  Target Sequence/siNA sense region
gccuccuaagaguaguauu

SEQ ID NO: 650 - RNA, 19 nt, Artificial Sequence
  Description of Artificial Sequence:  Target Sequence/siNA sense region
ugaugcuuucaagcuuaac

SEQ ID NO: 651 - RNA, 19 nt, Artificial Sequence
  Description of Artificial Sequence:  Target Sequence/siNA sense region
cauuaaguuguuggguauu

SEQ ID NO: 652 - RNA, 19 nt, Artificial Sequence
  Description of Artificial Sequence:  Target Sequence/siNA sense region
uggagguaaaccauguauc

SEQ ID NO: 653 - RNA, 19 nt, Artificial Sequence
  Description of Artificial Sequence:  Target Sequence/siNA sense region
caagguugcuacuguacag

SEQ ID NO: 654 - RNA, 19 nt, Artificial Sequence
  Description of Artificial Sequence:  Target Sequence/siNA sense region
gucuaaaaugucugacgua

SEQ ID NO: 655 - RNA, 19 nt, Artificial Sequence
  Description of Artificial Sequence:  Target Sequence/siNA sense region
aaagugcacaucuguggua

SEQ ID NO: 656 - RNA, 19 nt, Artificial Sequence
  Description of Artificial Sequence:  Target Sequence/siNA sense region
acugcucucgguucuucaa

SEQ ID NO: 657 - RNA, 19 nt, Artificial Sequence
  Description of Artificial Sequence:  Target Sequence/siNA sense region
acaacuuagaguagaguca

SEQ ID NO: 658 - RNA, 19 nt, Artificial Sequence
  Description of Artificial Sequence:  Target Sequence/siNA sense region
aucuucuaaauugugggca

SEQ ID NO: 659 - RNA, 19 nt, Artificial Sequence
  Description of Artificial Sequence:  Target Sequence/siNA sense region
acaauguguacaacuccac

SEQ ID NO: 660 - RNA, 19 nt, Artificial Sequence
  Description of Artificial Sequence:  Target Sequence/siNA sense region
caaugauauucuucuugca

SEQ ID NO: 661 - RNA, 19 nt, Artificial Sequence
  Description of Artificial Sequence:  Target Sequence/siNA sense region
aaaagacacaacugaagcu

SEQ ID NO: 662 - RNA, 19 nt, Artificial Sequence
  Description of Artificial Sequence:  Target Sequence/siNA sense region
uuucgagaagaugguuucu

SEQ ID NO: 663 - RNA, 19 nt, Artificial Sequence
  Description of Artificial Sequence:  Target Sequence/siNA sense region
ucuuuugucuguuuugcua

SEQ ID NO: 664 - RNA, 19 nt, Artificial Sequence
  Description of Artificial Sequence:  Target Sequence/siNA sense region
auccaugcagggugcugua

SEQ ID NO: 665 - RNA, 19 nt, Artificial Sequence
  Description of Artificial Sequence:  Target Sequence/siNA sense region
agacauuaauagguugugc

SEQ ID NO: 666 - RNA, 19 nt, Artificial Sequence
  Description of Artificial Sequence:  Target Sequence/siNA sense region
cgaggaaaugcucgauaac

SEQ ID NO: 667 - RNA, 19 nt, Artificial Sequence
  Description of Artificial Sequence:  Target Sequence/siNA sense region
ccgugcuacucuucaggcu

SEQ ID NO: 668 - RNA, 19 nt, Artificial Sequence
  Description of Artificial Sequence:  Target Sequence/siNA sense region
uauugcuucagaauuuagu

SEQ ID NO: 669 - RNA, 19 nt, Artificial Sequence
  Description of Artificial Sequence:  Target Sequence/siNA sense region
uucuuuaccaucauaugcc

SEQ ID NO: 670 - RNA, 19 nt, Artificial Sequence
  Description of Artificial Sequence:  Target Sequence/siNA sense region
cgcuuaugccacugcccag

SEQ ID NO: 671 - RNA, 19 nt, Artificial Sequence
  Description of Artificial Sequence:  Target Sequence/siNA sense region
ggaggccuaugagcaggcu

SEQ ID NO: 672 - RNA, 19 nt, Artificial Sequence
  Description of Artificial Sequence:  Target Sequence/siNA sense region
uguagcuaauggugauucu

SEQ ID NO: 673 - RNA, 19 nt, Artificial Sequence
  Description of Artificial Sequence:  Target Sequence/siNA sense region
ugaagucguucucaaaaag

SEQ ID NO: 674 - RNA, 19 nt, Artificial Sequence
  Description of Artificial Sequence:  Target Sequence/siNA sense region
guuaaagaaaucuuugaau

SEQ ID NO: 675 - RNA, 19 nt, Artificial Sequence
  Description of Artificial Sequence:  Target Sequence/siNA sense region
uguggcuaaaucugaguuu

SEQ ID NO: 676 - RNA, 19 nt, Artificial Sequence
  Description of Artificial Sequence:  Target Sequence/siNA sense region
ugaccgugaugcugccaug

SEQ ID NO: 677 - RNA, 19 nt, Artificial Sequence
  Description of Artificial Sequence:  Target Sequence/siNA sense region
gcaacgcaaguuggaaaag

SEQ ID NO: 678 - RNA, 19 nt, Artificial Sequence
  Description of Artificial Sequence:  Target Sequence/siNA sense region
gauggcagaucaggcuaug

SEQ ID NO: 679 - RNA, 19 nt, Artificial Sequence
  Description of Artificial Sequence:  Target Sequence/siNA sense region
gacccaaauguacaaacag

SEQ ID NO: 680 - RNA, 19 nt, Artificial Sequence
  Description of Artificial Sequence:  Target Sequence/siNA sense region
ggcaagaucugaggacaag

SEQ ID NO: 681 - RNA, 19 nt, Artificial Sequence
  Description of Artificial Sequence:  Target Sequence/siNA sense region
gagggcaaaaguaacuagu

SEQ ID NO: 682 - RNA, 19 nt, Artificial Sequence
  Description of Artificial Sequence:  Target Sequence/siNA sense region
ugcuaugcaaacaaugcuc

SEQ ID NO: 683 - RNA, 19 nt, Artificial Sequence
  Description of Artificial Sequence:  Target Sequence/siNA sense region
cuucacuaugcuuaggaag

SEQ ID NO: 684 - RNA, 19 nt, Artificial Sequence
  Description of Artificial Sequence:  Target Sequence/siNA sense region
gcuugauaaugaugcacuu

SEQ ID NO: 685 - RNA, 19 nt, Artificial Sequence
  Description of Artificial Sequence:  Target Sequence/siNA sense region
uaacaacauuaucaacaau

SEQ ID NO: 686 - RNA, 19 nt, Artificial Sequence
  Description of Artificial Sequence:  Target Sequence/siNA sense region
ugcgcgugaugguuguguu

SEQ ID NO: 687 - RNA, 19 nt, Artificial Sequence
  Description of Artificial Sequence:  Target Sequence/siNA sense region
uccacucaacaucauacca

SEQ ID NO: 688 - RNA, 19 nt, Artificial Sequence
  Description of Artificial Sequence:  Target Sequence/siNA sense region
auugacuacagcagccaaa

SEQ ID NO: 689 - RNA, 19 nt, Artificial Sequence
  Description of Artificial Sequence:  Target Sequence/siNA sense region
acucaugguuguugucccu

SEQ ID NO: 690 - RNA, 19 nt, Artificial Sequence
  Description of Artificial Sequence:  Target Sequence/siNA sense region
ugauuaugguaccuacaag

SEQ ID NO: 691 - RNA, 19 nt, Artificial Sequence
  Description of Artificial Sequence:  Target Sequence/siNA sense region
gaacacuugugaugguaac

SEQ ID NO: 692 - RNA, 19 nt, Artificial Sequence
  Description of Artificial Sequence:  Target Sequence/siNA sense region
caccuuuacauaugcaucu

SEQ ID NO: 693 - RNA, 19 nt, Artificial Sequence
  Description of Artificial Sequence:  Target Sequence/siNA sense region
ugcacucugggaaauccag

SEQ ID NO: 694 - RNA, 19 nt, Artificial Sequence
  Description of Artificial Sequence:  Target Sequence/siNA sense region
gcaaguuguugaugcggau

SEQ ID NO: 695 - RNA, 19 nt, Artificial Sequence
  Description of Artificial Sequence:  Target Sequence/siNA sense region
uagcaagauuguucaacuu

SEQ ID NO: 696 - RNA, 19 nt, Artificial Sequence
  Description of Artificial Sequence:  Target Sequence/siNA sense region
uagugaaauuaacauggac

SEQ ID NO: 697 - RNA, 19 nt, Artificial Sequence
  Description of Artificial Sequence:  Target Sequence/siNA sense region
caauucaccaaauuuggcu

SEQ ID NO: 698 - RNA, 19 nt, Artificial Sequence
  Description of Artificial Sequence:  Target Sequence/siNA sense region
uuggccucuuauuguuaca

SEQ ID NO: 699 - RNA, 19 nt, Artificial Sequence
  Description of Artificial Sequence:  Target Sequence/siNA sense region
agcucuaagagccaacuca

SEQ ID NO: 700 - RNA, 19 nt, Artificial Sequence
  Description of Artificial Sequence:  Target Sequence/siNA sense region
agcuguuaaacuacagaau

SEQ ID NO: 701 - RNA, 19 nt, Artificial Sequence
  Description of Artificial Sequence:  Target Sequence/siNA sense region
uaaugaacugaguccagua

SEQ ID NO: 702 - RNA, 19 nt, Artificial Sequence
  Description of Artificial Sequence:  Target Sequence/siNA sense region
agcacuacgacagaugucc

SEQ ID NO: 703 - RNA, 19 nt, Artificial Sequence
  Description of Artificial Sequence:  Target Sequence/siNA sense region
cugugcggcugguaccaca

SEQ ID NO: 704 - RNA, 19 nt, Artificial Sequence
  Description of Artificial Sequence:  Target Sequence/siNA sense region
acaaacagcuuguacugau

SEQ ID NO: 705 - RNA, 19 nt, Artificial Sequence
  Description of Artificial Sequence:  Target Sequence/siNA sense region
ugacaaugcacuugccuac

SEQ ID NO: 706 - RNA, 19 nt, Artificial Sequence
  Description of Artificial Sequence:  Target Sequence/siNA sense region
cuauaacaauucgaaggga

SEQ ID NO: 707 - RNA, 19 nt, Artificial Sequence
  Description of Artificial Sequence:  Target Sequence/siNA sense region
agguagguuugugcuggca

SEQ ID NO: 708 - RNA, 19 nt, Artificial Sequence
  Description of Artificial Sequence:  Target Sequence/siNA sense region
auuacuaucagaccaccaa

SEQ ID NO: 709 - RNA, 19 nt, Artificial Sequence
  Description of Artificial Sequence:  Target Sequence/siNA sense region
agaucucaaaugggcuaga

SEQ ID NO: 710 - RNA, 19 nt, Artificial Sequence
  Description of Artificial Sequence:  Target Sequence/siNA sense region
auucccuaagagugauggu

SEQ ID NO: 711 - RNA, 19 nt, Artificial Sequence
  Description of Artificial Sequence:  Target Sequence/siNA sense region
uacagguacaauuuacaca

SEQ ID NO: 712 - RNA, 19 nt, Artificial Sequence
  Description of Artificial Sequence:  Target Sequence/siNA sense region
agaacuggaaccaccuugu

SEQ ID NO: 713 - RNA, 19 nt, Artificial Sequence
  Description of Artificial Sequence:  Target Sequence/siNA sense region
uagguuuguuacagacaca

SEQ ID NO: 714 - RNA, 19 nt, Artificial Sequence
  Description of Artificial Sequence:  Target Sequence/siNA sense region
accaaaagggccuaaagug

SEQ ID NO: 715 - RNA, 19 nt, Artificial Sequence
  Description of Artificial Sequence:  Target Sequence/siNA sense region
gaaauacuuguacuucauc

SEQ ID NO: 716 - RNA, 19 nt, Artificial Sequence
  Description of Artificial Sequence:  Target Sequence/siNA sense region
caaaggcuuaaacaaccua

SEQ ID NO: 717 - RNA, 19 nt, Artificial Sequence
  Description of Artificial Sequence:  Target Sequence/siNA sense region
aaauagagguauggugcug

SEQ ID NO: 718 - RNA, 19 nt, Artificial Sequence
  Description of Artificial Sequence:  Target Sequence/siNA sense region
gggcaguuuagcugcuaca

SEQ ID NO: 719 - RNA, 19 nt, Artificial Sequence
  Description of Artificial Sequence:  Target Sequence/siNA sense region
aguacgucuucaggcugga

SEQ ID NO: 720 - RNA, 19 nt, Artificial Sequence
  Description of Artificial Sequence:  Target Sequence/siNA sense region
aaaugcuacagaaguaccu

SEQ ID NO: 721 - RNA, 19 nt, Artificial Sequence
  Description of Artificial Sequence:  Target Sequence/siNA sense region
ugccaauucaacugugcuu

SEQ ID NO: 722 - RNA, 19 nt, Artificial Sequence
  Description of Artificial Sequence:  Target Sequence/siNA sense region
uuccuucugugcuuuugca

SEQ ID NO: 723 - RNA, 19 nt, Artificial Sequence
  Description of Artificial Sequence:  Target Sequence/siNA sense region
aguagacccugcuaaagca

SEQ ID NO: 724 - RNA, 19 nt, Artificial Sequence
  Description of Artificial Sequence:  Target Sequence/siNA sense region
auauaaggauuaccuagca

SEQ ID NO: 725 - RNA, 19 nt, Artificial Sequence
  Description of Artificial Sequence:  Target Sequence/siNA sense region
aaguggaggacaaccaauc

SEQ ID NO: 726 - RNA, 19 nt, Artificial Sequence
  Description of Artificial Sequence:  Target Sequence/siNA sense region
caccaacugugugaagaug

SEQ ID NO: 727 - RNA, 19 nt, Artificial Sequence
  Description of Artificial Sequence:  Target Sequence/siNA sense region
guuguguacacacacuggu

SEQ ID NO: 728 - RNA, 19 nt, Artificial Sequence
  Description of Artificial Sequence:  Target Sequence/siNA sense region
uacaggacaggcaauuacu

SEQ ID NO: 729 - RNA, 19 nt, Artificial Sequence
  Description of Artificial Sequence:  Target Sequence/siNA sense region
uguaacaccagaagcuaac

SEQ ID NO: 730 - RNA, 19 nt, Artificial Sequence
  Description of Artificial Sequence:  Target Sequence/siNA sense region
cauggaccaagaguccuuu

SEQ ID NO: 731 - RNA, 19 nt, Artificial Sequence
  Description of Artificial Sequence:  Target Sequence/siNA sense region
ugguggugcuucauguugu

SEQ ID NO: 732 - RNA, 19 nt, Artificial Sequence
  Description of Artificial Sequence:  Target Sequence/siNA sense region
ucuguauuguagaugccac

SEQ ID NO: 733 - RNA, 19 nt, Artificial Sequence
  Description of Artificial Sequence:  Target Sequence/siNA sense region
cauugaccauccaaauccu

SEQ ID NO: 734 - RNA, 19 nt, Artificial Sequence
  Description of Artificial Sequence:  Target Sequence/siNA sense region
uaaaggauucugugacuug

SEQ ID NO: 735 - RNA, 19 nt, Artificial Sequence
  Description of Artificial Sequence:  Target Sequence/siNA sense region
gaaagguaaguacguccaa

SEQ ID NO: 736 - RNA, 19 nt, Artificial Sequence
  Description of Artificial Sequence:  Target Sequence/siNA sense region
aauaccuaccacuugugcu

SEQ ID NO: 737 - RNA, 19 nt, Artificial Sequence
  Description of Artificial Sequence:  Target Sequence/siNA sense region
uaaugacccaguggguuuu

SEQ ID NO: 738 - RNA, 19 nt, Artificial Sequence
  Description of Artificial Sequence:  Target Sequence/siNA sense region
uacacuuagaaacacaguc

SEQ ID NO: 739 - RNA, 19 nt, Artificial Sequence
  Description of Artificial Sequence:  Target Sequence/siNA sense region
cuguaccgucugcggaaug

SEQ ID NO: 740 - RNA, 19 nt, Artificial Sequence
  Description of Artificial Sequence:  Target Sequence/siNA sense region
guggaaagguuauggcugu

SEQ ID NO: 741 - RNA, 19 nt, Artificial Sequence
  Description of Artificial Sequence:  Target Sequence/siNA sense region
uaguugugaccaacuccgc

SEQ ID NO: 742 - RNA, 19 nt, Artificial Sequence
  Description of Artificial Sequence:  Target Sequence/siNA sense region
cgaacccuugaugcagucu

SEQ ID NO: 743 - RNA, 19 nt, Artificial Sequence
  Description of Artificial Sequence:  Target Sequence/siNA sense region
ugcggaugcaucaacguuu

SEQ ID NO: 744 - RNA, 19 nt, Artificial Sequence
  Description of Artificial Sequence:  Target Sequence/siNA sense region
uuuaaacggguuugcggug

SEQ ID NO: 745 - RNA, 19 nt, Artificial Sequence
  Description of Artificial Sequence:  Target Sequence/siNA sense region
guaagugcagcccgucuua

SEQ ID NO: 746 - RNA, 19 nt, Artificial Sequence
  Description of Artificial Sequence:  Target Sequence/siNA sense region
acaccgugcggcacaggca

SEQ ID NO: 747 - RNA, 19 nt, Artificial Sequence
  Description of Artificial Sequence:  Target Sequence/siNA sense region
acuaguacugaugucgucu

SEQ ID NO: 748 - RNA, 19 nt, Artificial Sequence
  Description of Artificial Sequence:  Target Sequence/siNA sense region
uacagggcuuuugauauuu

SEQ ID NO: 749 - RNA, 19 nt, Artificial Sequence
  Description of Artificial Sequence:  Target Sequence/siNA sense region
uacaacgaaaaaguugcug

SEQ ID NO: 750 - RNA, 19 nt, Artificial Sequence
  Description of Artificial Sequence:  Target Sequence/siNA sense region
gguuuugcaaaguuccuaa

SEQ ID NO: 751 - RNA, 19 nt, Artificial Sequence
  Description of Artificial Sequence:  Target Sequence/siNA sense region
aaaacuaauugcugucgcu

SEQ ID NO: 752 - RNA, 19 nt, Artificial Sequence
  Description of Artificial Sequence:  Target Sequence/siNA sense region
uuccaggagaaggaugagg

SEQ ID NO: 753 - RNA, 19 nt, Artificial Sequence
  Description of Artificial Sequence:  Target Sequence/siNA sense region
gaaggcaauuuauuagacu

SEQ ID NO: 754 - RNA, 19 nt, Artificial Sequence
  Description of Artificial Sequence:  Target Sequence/siNA sense region
ucuuacuuuguaguuaaga

SEQ ID NO: 755 - RNA, 19 nt, Artificial Sequence
  Description of Artificial Sequence:  Target Sequence/siNA sense region
aggcauacuaugucuaacu

SEQ ID NO: 756 - RNA, 19 nt, Artificial Sequence
  Description of Artificial Sequence:  Target Sequence/siNA sense region
uaccaacaugaagagacua

SEQ ID NO: 757 - RNA, 19 nt, Artificial Sequence
  Description of Artificial Sequence:  Target Sequence/siNA sense region
auuuauaacuugguuaaag

SEQ ID NO: 758 - RNA, 19 nt, Artificial Sequence
  Description of Artificial Sequence:  Target Sequence/siNA sense region
gauuguccagcgguugcug

SEQ ID NO: 759 - RNA, 19 nt, Artificial Sequence
  Description of Artificial Sequence:  Target Sequence/siNA sense region
guccaugacuuuuucaagu

SEQ ID NO: 760 - RNA, 19 nt, Artificial Sequence
  Description of Artificial Sequence:  Target Sequence/siNA sense region
uuuagaguagauggugaca

SEQ ID NO: 761 - RNA, 19 nt, Artificial Sequence
  Description of Artificial Sequence:  Target Sequence/siNA sense region
augguaccacauauaucac

SEQ ID NO: 762 - RNA, 19 nt, Artificial Sequence
  Description of Artificial Sequence:  Target Sequence/siNA sense region
cgucagcgucuaacuaaau

SEQ ID NO: 763 - RNA, 19 nt, Artificial Sequence
  Description of Artificial Sequence:  Target Sequence/siNA sense region
uacacaauggcugauuuag

SEQ ID NO: 764 - RNA, 19 nt, Artificial Sequence
  Description of Artificial Sequence:  Target Sequence/siNA sense region
gucuaugcucuacgucauu

SEQ ID NO: 765 - RNA, 19 nt, Artificial Sequence
  Description of Artificial Sequence:  Target Sequence/siNA sense region
uuugaugaggguaauugug

SEQ ID NO: 766 - RNA, 19 nt, Artificial Sequence
  Description of Artificial Sequence:  Target Sequence/siNA sense region
gauacauuaaaagaaauac

SEQ ID NO: 767 - RNA, 19 nt, Artificial Sequence
  Description of Artificial Sequence:  Target Sequence/siNA sense region
cucgucacauacaauugcu

SEQ ID NO: 768 - RNA, 19 nt, Artificial Sequence
  Description of Artificial Sequence:  Target Sequence/siNA sense region
ugugaugaugauuauuuca

SEQ ID NO: 769 - RNA, 19 nt, Artificial Sequence
  Description of Artificial Sequence:  Target Sequence/siNA sense region
aauaagaaggauugguaug

SEQ ID NO: 770 - RNA, 19 nt, Artificial Sequence
  Description of Artificial Sequence:  Target Sequence/siNA sense region
gacuucguagagaauccug

SEQ ID NO: 771 - RNA, 19 nt, Artificial Sequence
  Description of Artificial Sequence:  Target Sequence/siNA sense region
gacaucuuacgcguauaug

SEQ ID NO: 772 - RNA, 19 nt, Artificial Sequence
  Description of Artificial Sequence:  Target Sequence/siNA sense region
gcuaacuuaggugagcgug

SEQ ID NO: 773 - RNA, 19 nt, Artificial Sequence
  Description of Artificial Sequence:  Target Sequence/siNA sense region
guacgccaaucauuauuaa

SEQ ID NO: 774 - RNA, 19 nt, Artificial Sequence
  Description of Artificial Sequence:  Target Sequence/siNA sense region
aagacuguacaauucugcg

SEQ ID NO: 775 - RNA, 19 nt, Artificial Sequence
  Description of Artificial Sequence:  Target Sequence/siNA sense region
gaugcuaugcgugaugcag

SEQ ID NO: 776 - RNA, 19 nt, Artificial Sequence
  Description of Artificial Sequence:  Target Sequence/siNA sense region
ggcauuguaggcguacuga

SEQ ID NO: 777 - RNA, 19 nt, Artificial Sequence
  Description of Artificial Sequence:  Target Sequence/siNA sense region
acauuagauaaucaggauc

SEQ ID NO: 778 - RNA, 19 nt, Artificial Sequence
  Description of Artificial Sequence:  Target Sequence/siNA sense region
cuuaaugggaacugguacg

SEQ ID NO: 779 - RNA, 19 nt, Artificial Sequence
  Description of Artificial Sequence:  Target Sequence/siNA sense region
gauuucggugauuucguac

SEQ ID NO: 780 - RNA, 19 nt, Artificial Sequence
  Description of Artificial Sequence:  Target Sequence/siNA sense region
caaguagcaccaggcugcg

SEQ ID NO: 781 - RNA, 19 nt, Artificial Sequence
  Description of Artificial Sequence:  Target Sequence/siNA sense region
ggaguuccuauuguggauu

SEQ ID NO: 782 - RNA, 19 nt, Artificial Sequence
  Description of Artificial Sequence:  Target Sequence/siNA sense region
ucauauuacucauugcuga

SEQ ID NO: 783 - RNA, 19 nt, Artificial Sequence
  Description of Artificial Sequence:  Target Sequence/siNA sense region
augcccauccucacuuuga

SEQ ID NO: 784 - RNA, 19 nt, Artificial Sequence
  Description of Artificial Sequence:  Target Sequence/siNA sense region
acuagggcauuggcugcug

SEQ ID NO: 785 - RNA, 19 nt, Artificial Sequence
  Description of Artificial Sequence:  Target Sequence/siNA sense region
gagucccauauggaugcug

SEQ ID NO: 786 - RNA, 19 nt, Artificial Sequence
  Description of Artificial Sequence:  Target Sequence/siNA sense region
gaucucgcaaaaccacuua

SEQ ID NO: 787 - RNA, 19 nt, Artificial Sequence
  Description of Artificial Sequence:  Target Sequence/siNA sense region
auuaagugggauuugcuga

SEQ ID NO: 788 - RNA, 19 nt, Artificial Sequence
  Description of Artificial Sequence:  Target Sequence/siNA sense region
aaauaugauuuuacggaag

SEQ ID NO: 789 - RNA, 19 nt, Artificial Sequence
  Description of Artificial Sequence:  Target Sequence/siNA sense region
gagagacuuugucucuucg

SEQ ID NO: 790 - RNA, 19 nt, Artificial Sequence
  Description of Artificial Sequence:  Target Sequence/siNA sense region
gaccguuauuuuaaauauu

SEQ ID NO: 791 - RNA, 19 nt, Artificial Sequence
  Description of Artificial Sequence:  Target Sequence/siNA sense region
ugggaccagacauaccauc

SEQ ID NO: 792 - RNA, 19 nt, Artificial Sequence
  Description of Artificial Sequence:  Target Sequence/siNA sense region
cccaauuguauuaacuguu

SEQ ID NO: 793 - RNA, 19 nt, Artificial Sequence
  Description of Artificial Sequence:  Target Sequence/siNA sense region
uuggaugauagguguaucc

SEQ ID NO: 794 - RNA, 19 nt, Artificial Sequence
  Description of Artificial Sequence:  Target Sequence/siNA sense region
cuucauugugcaaacuuua

SEQ ID NO: 795 - RNA, 19 nt, Artificial Sequence
  Description of Artificial Sequence:  Target Sequence/siNA sense region
aauguguuauuuucuacug

SEQ ID NO: 796 - RNA, 19 nt, Artificial Sequence
  Description of Artificial Sequence:  Target Sequence/siNA sense region
guguuuccaccuacaaguu

SEQ ID NO: 797 - RNA, 19 nt, Artificial Sequence
  Description of Artificial Sequence:  Target Sequence/siNA sense region
uuuggaccacuaguaagaa

SEQ ID NO: 798 - RNA, 19 nt, Artificial Sequence
  Description of Artificial Sequence:  Target Sequence/siNA sense region
aaaauauuuguagauggug

SEQ ID NO: 799 - RNA, 19 nt, Artificial Sequence
  Description of Artificial Sequence:  Target Sequence/siNA sense region
guuccuuuuguuguuucaa

SEQ ID NO: 800 - RNA, 19 nt, Artificial Sequence
  Description of Artificial Sequence:  Target Sequence/siNA sense region
acuggauaccauuuucgug

SEQ ID NO: 801 - RNA, 19 nt, Artificial Sequence
  Description of Artificial Sequence:  Target Sequence/siNA sense region
gaguuaggagucguacaua

SEQ ID NO: 802 - RNA, 19 nt, Artificial Sequence
  Description of Artificial Sequence:  Target Sequence/siNA sense region
aaucaggauguaaacuuac

SEQ ID NO: 803 - RNA, 19 nt, Artificial Sequence
  Description of Artificial Sequence:  Target Sequence/siNA sense region
cauagcucgcgucucaguu

SEQ ID NO: 804 - RNA, 19 nt, Artificial Sequence
  Description of Artificial Sequence:  Target Sequence/siNA sense region
uucaaggaacuuuuagugu

SEQ ID NO: 805 - RNA, 19 nt, Artificial Sequence
  Description of Artificial Sequence:  Target Sequence/siNA sense region
uaugcugcugauccagcua

SEQ ID NO: 806 - RNA, 19 nt, Artificial Sequence
  Description of Artificial Sequence:  Target Sequence/siNA sense region
augcaugcagcuucuggca

SEQ ID NO: 807 - RNA, 19 nt, Artificial Sequence
  Description of Artificial Sequence:  Target Sequence/siNA sense region
aauuuauugcuagauaaac

SEQ ID NO: 808 - RNA, 19 nt, Artificial Sequence
  Description of Artificial Sequence:  Target Sequence/siNA sense region
cgcacuacaugcuuuucag

SEQ ID NO: 809 - RNA, 19 nt, Artificial Sequence
  Description of Artificial Sequence:  Target Sequence/siNA sense region
guagcugcacuaacaaaca

SEQ ID NO: 810 - RNA, 19 nt, Artificial Sequence
  Description of Artificial Sequence:  Target Sequence/siNA sense region
aauguugcuuuucaaacug

SEQ ID NO: 811 - RNA, 19 nt, Artificial Sequence
  Description of Artificial Sequence:  Target Sequence/siNA sense region
gucaaacccgguaauuuua

SEQ ID NO: 812 - RNA, 19 nt, Artificial Sequence
  Description of Artificial Sequence:  Target Sequence/siNA sense region
aauaaagacuuuuaugacu

SEQ ID NO: 813 - RNA, 19 nt, Artificial Sequence
  Description of Artificial Sequence:  Target Sequence/siNA sense region
uuugcugugucuaaagguu

SEQ ID NO: 814 - RNA, 19 nt, Artificial Sequence
  Description of Artificial Sequence:  Target Sequence/siNA sense region
uucuuuaaggaaggaaguu

SEQ ID NO: 815 - RNA, 19 nt, Artificial Sequence
  Description of Artificial Sequence:  Target Sequence/siNA sense region
ucuguugaacuaaaacacu

SEQ ID NO: 816 - RNA, 19 nt, Artificial Sequence
  Description of Artificial Sequence:  Target Sequence/siNA sense region
uucuucuuugcucaggaug

SEQ ID NO: 817 - RNA, 19 nt, Artificial Sequence
  Description of Artificial Sequence:  Target Sequence/siNA sense region
ggcaacgcugcuaucagug

SEQ ID NO: 818 - RNA, 19 nt, Artificial Sequence
  Description of Artificial Sequence:  Target Sequence/siNA sense region
gauuaugacuauuaucguu

SEQ ID NO: 819 - RNA, 19 nt, Artificial Sequence
  Description of Artificial Sequence:  Target Sequence/siNA sense region
uauaaucugccaacaaugu

SEQ ID NO: 820 - RNA, 19 nt, Artificial Sequence
  Description of Artificial Sequence:  Target Sequence/siNA sense region
ugugauaucagacaacucc

SEQ ID NO: 821 - RNA, 19 nt, Artificial Sequence
  Description of Artificial Sequence:  Target Sequence/siNA sense region
cuauucguaguugaaguug

SEQ ID NO: 822 - RNA, 19 nt, Artificial Sequence
  Description of Artificial Sequence:  Target Sequence/siNA sense region
guugauaaauacuuugauu

SEQ ID NO: 823 - RNA, 19 nt, Artificial Sequence
  Description of Artificial Sequence:  Target Sequence/siNA sense region
uguuacgaugguggcugua

SEQ ID NO: 824 - RNA, 19 nt, Artificial Sequence
  Description of Artificial Sequence:  Target Sequence/siNA sense region
auuaaugccaaccaaguaa

SEQ ID NO: 825 - RNA, 19 nt, Artificial Sequence
  Description of Artificial Sequence:  Target Sequence/siNA sense region
aucguuaacaaucuggaua

SEQ ID NO: 826 - RNA, 19 nt, Artificial Sequence
  Description of Artificial Sequence:  Target Sequence/siNA sense region
aaaucagcugguuucccau

SEQ ID NO: 827 - RNA, 19 nt, Artificial Sequence
  Description of Artificial Sequence:  Target Sequence/siNA sense region
uuuaauaaaugggguaagg

SEQ ID NO: 828 - RNA, 19 nt, Artificial Sequence
  Description of Artificial Sequence:  Target Sequence/siNA sense region
gcuagacuuuauuaugacu

SEQ ID NO: 829 - RNA, 19 nt, Artificial Sequence
  Description of Artificial Sequence:  Target Sequence/siNA sense region
ucaaugaguuaugaggauc

SEQ ID NO: 830 - RNA, 19 nt, Artificial Sequence
  Description of Artificial Sequence:  Target Sequence/siNA sense region
caagaugcacuuuucgcgu

SEQ ID NO: 831 - RNA, 19 nt, Artificial Sequence
  Description of Artificial Sequence:  Target Sequence/siNA sense region
uauacuaagcguaauguca

SEQ ID NO: 832 - RNA, 19 nt, Artificial Sequence
  Description of Artificial Sequence:  Target Sequence/siNA sense region
aucccuacuauaacucaaa

SEQ ID NO: 833 - RNA, 19 nt, Artificial Sequence
  Description of Artificial Sequence:  Target Sequence/siNA sense region
augaaucuuaaguaugcca

SEQ ID NO: 834 - RNA, 19 nt, Artificial Sequence
  Description of Artificial Sequence:  Target Sequence/siNA sense region
auuagugcaaagaauagag

SEQ ID NO: 835 - RNA, 19 nt, Artificial Sequence
  Description of Artificial Sequence:  Target Sequence/siNA sense region
gcucgcaccguagcuggug

SEQ ID NO: 836 - RNA, 19 nt, Artificial Sequence
  Description of Artificial Sequence:  Target Sequence/siNA sense region
gucucuaucuguaguacua

SEQ ID NO: 837 - RNA, 19 nt, Artificial Sequence
  Description of Artificial Sequence:  Target Sequence/siNA sense region
augacaaauagacaguuuc

SEQ ID NO: 838 - RNA, 19 nt, Artificial Sequence
  Description of Artificial Sequence:  Target Sequence/siNA sense region
caucagaaauuauugaagu

SEQ ID NO: 839 - RNA, 19 nt, Artificial Sequence
  Description of Artificial Sequence:  Target Sequence/siNA sense region
ucaauagccgccacuagag

SEQ ID NO: 840 - RNA, 19 nt, Artificial Sequence
  Description of Artificial Sequence:  Target Sequence/siNA sense region
ggagcuacugugguaauug

SEQ ID NO: 841 - RNA, 19 nt, Artificial Sequence
  Description of Artificial Sequence:  Target Sequence/siNA sense region
ggaacaagcaaguuuuacg

SEQ ID NO: 842 - RNA, 19 nt, Artificial Sequence
  Description of Artificial Sequence:  Target Sequence/siNA sense region
gguggcuggcauaauaugu

SEQ ID NO: 843 - RNA, 19 nt, Artificial Sequence
  Description of Artificial Sequence:  Target Sequence/siNA sense region
uuaaaaacuguuuacagug

SEQ ID NO: 844 - RNA, 19 nt, Artificial Sequence
  Description of Artificial Sequence:  Target Sequence/siNA sense region
gauguagaaacuccacacc

SEQ ID NO: 845 - RNA, 19 nt, Artificial Sequence
  Description of Artificial Sequence:  Target Sequence/siNA sense region
cuuauggguugggauuauc

SEQ ID NO: 846 - RNA, 19 nt, Artificial Sequence
  Description of Artificial Sequence:  Target Sequence/siNA sense region
ccaaaaugugacagagcca

SEQ ID NO: 847 - RNA, 19 nt, Artificial Sequence
  Description of Artificial Sequence:  Target Sequence/siNA sense region
augccuaacaugcuuagga

SEQ ID NO: 848 - RNA, 19 nt, Artificial Sequence
  Description of Artificial Sequence:  Target Sequence/siNA sense region
auaauggccucucuuguuc

SEQ ID NO: 849 - RNA, 19 nt, Artificial Sequence
  Description of Artificial Sequence:  Target Sequence/siNA sense region
cuugcucgcaaacauaaca

SEQ ID NO: 850 - RNA, 19 nt, Artificial Sequence
  Description of Artificial Sequence:  Target Sequence/siNA sense region
acuugcuguaacuuaucac

SEQ ID NO: 851 - RNA, 19 nt, Artificial Sequence
  Description of Artificial Sequence:  Target Sequence/siNA sense region
caccguuucuacagguuag

SEQ ID NO: 852 - RNA, 19 nt, Artificial Sequence
  Description of Artificial Sequence:  Target Sequence/siNA sense region
gcuaacgagugugcgcaag

SEQ ID NO: 853 - RNA, 19 nt, Artificial Sequence
  Description of Artificial Sequence:  Target Sequence/siNA sense region
guauuaagugagaugguca

SEQ ID NO: 854 - RNA, 19 nt, Artificial Sequence
  Description of Artificial Sequence:  Target Sequence/siNA sense region
auguguggcggcucacuau

SEQ ID NO: 855 - RNA, 19 nt, Artificial Sequence
  Description of Artificial Sequence:  Target Sequence/siNA sense region
uauguuaaaccagguggaa

SEQ ID NO: 856 - RNA, 19 nt, Artificial Sequence
  Description of Artificial Sequence:  Target Sequence/siNA sense region
acaucauccggugaugcua

SEQ ID NO: 857 - RNA, 19 nt, Artificial Sequence
  Description of Artificial Sequence:  Target Sequence/siNA sense region
acaacugcuuaugcuaaua

SEQ ID NO: 858 - RNA, 19 nt, Artificial Sequence
  Description of Artificial Sequence:  Target Sequence/siNA sense region
agugucuuuaacauuuguc

SEQ ID NO: 859 - RNA, 19 nt, Artificial Sequence
  Description of Artificial Sequence:  Target Sequence/siNA sense region
caagcuguuacagccaaug

SEQ ID NO: 860 - RNA, 19 nt, Artificial Sequence
  Description of Artificial Sequence:  Target Sequence/siNA sense region
guaaaugcacuucuuucaa

SEQ ID NO: 861 - RNA, 19 nt, Artificial Sequence
  Description of Artificial Sequence:  Target Sequence/siNA sense region
acugaugguaauaagauag

SEQ ID NO: 862 - RNA, 19 nt, Artificial Sequence
  Description of Artificial Sequence:  Target Sequence/siNA sense region
gcugacaaguauguccgca

SEQ ID NO: 863 - RNA, 19 nt, Artificial Sequence
  Description of Artificial Sequence:  Target Sequence/siNA sense region
aaucuacaacacaggcucu

SEQ ID NO: 864 - RNA, 19 nt, Artificial Sequence
  Description of Artificial Sequence:  Target Sequence/siNA sense region
uaugagugucucuauagaa

SEQ ID NO: 865 - RNA, 19 nt, Artificial Sequence
  Description of Artificial Sequence:  Target Sequence/siNA sense region
aauagggauguugaucaug

SEQ ID NO: 866 - RNA, 19 nt, Artificial Sequence
  Description of Artificial Sequence:  Target Sequence/siNA sense region
gaauucguggaugaguuuu

SEQ ID NO: 867 - RNA, 19 nt, Artificial Sequence
  Description of Artificial Sequence:  Target Sequence/siNA sense region
uacgcuuaccugcguaaac

SEQ ID NO: 868 - RNA, 19 nt, Artificial Sequence
  Description of Artificial Sequence:  Target Sequence/siNA sense region
cauuucuccaugaugauuc

SEQ ID NO: 869 - RNA, 19 nt, Artificial Sequence
  Description of Artificial Sequence:  Target Sequence/siNA sense region
cuuucugaugaugccguug

SEQ ID NO: 870 - RNA, 19 nt, Artificial Sequence
  Description of Artificial Sequence:  Target Sequence/siNA sense region
gugugcuauaacaguaacu

SEQ ID NO: 871 - RNA, 19 nt, Artificial Sequence
  Description of Artificial Sequence:  Target Sequence/siNA sense region
uaugcggcucaagguuuag

SEQ ID NO: 872 - RNA, 19 nt, Artificial Sequence
  Description of Artificial Sequence:  Target Sequence/siNA sense region
guagcuagcauuaagaacu

SEQ ID NO: 873 - RNA, 19 nt, Artificial Sequence
  Description of Artificial Sequence:  Target Sequence/siNA sense region
uuuaaggcaguucuuuauu

SEQ ID NO: 874 - RNA, 19 nt, Artificial Sequence
  Description of Artificial Sequence:  Target Sequence/siNA sense region
uaucaaaauaauguguuca

SEQ ID NO: 875 - RNA, 19 nt, Artificial Sequence
  Description of Artificial Sequence:  Target Sequence/siNA sense region
augucugaggcaaaauguu

SEQ ID NO: 876 - RNA, 19 nt, Artificial Sequence
  Description of Artificial Sequence:  Target Sequence/siNA sense region
uggacugagacugaccuua

SEQ ID NO: 877 - RNA, 19 nt, Artificial Sequence
  Description of Artificial Sequence:  Target Sequence/siNA sense region
acuaaaggaccucacgaau

SEQ ID NO: 878 - RNA, 19 nt, Artificial Sequence
  Description of Artificial Sequence:  Target Sequence/siNA sense region
uuuugcucacagcauacaa

SEQ ID NO: 879 - RNA, 19 nt, Artificial Sequence
  Description of Artificial Sequence:  Target Sequence/siNA sense region
augcuaguuaaacaaggag

SEQ ID NO: 880 - RNA, 19 nt, Artificial Sequence
  Description of Artificial Sequence:  Target Sequence/siNA sense region
gaugauuacguguaccugc

SEQ ID NO: 881 - RNA, 19 nt, Artificial Sequence
  Description of Artificial Sequence:  Target Sequence/siNA sense region
ccuuacccagauccaucaa

SEQ ID NO: 882 - RNA, 19 nt, Artificial Sequence
  Description of Artificial Sequence:  Target Sequence/siNA sense region
agaauauuaggcgcaggcu

SEQ ID NO: 883 - RNA, 19 nt, Artificial Sequence
  Description of Artificial Sequence:  Target Sequence/siNA sense region
uguuuugucgaugauauug

SEQ ID NO: 884 - RNA, 19 nt, Artificial Sequence
  Description of Artificial Sequence:  Target Sequence/siNA sense region
gucaaaacagaugguacac

SEQ ID NO: 885 - RNA, 19 nt, Artificial Sequence
  Description of Artificial Sequence:  Target Sequence/siNA sense region
cuuaugauugaaagguucg

SEQ ID NO: 886 - RNA, 19 nt, Artificial Sequence
  Description of Artificial Sequence:  Target Sequence/siNA sense region
gugucacuggcuauugaug

SEQ ID NO: 887 - RNA, 19 nt, Artificial Sequence
  Description of Artificial Sequence:  Target Sequence/siNA sense region
gcuuacccacuuacaaaac

SEQ ID NO: 888 - RNA, 19 nt, Artificial Sequence
  Description of Artificial Sequence:  Target Sequence/siNA sense region
cauccuaaucaggaguaug

SEQ ID NO: 889 - RNA, 19 nt, Artificial Sequence
  Description of Artificial Sequence:  Target Sequence/siNA sense region
gcugaugucuuucacuugu

SEQ ID NO: 890 - RNA, 19 nt, Artificial Sequence
  Description of Artificial Sequence:  Target Sequence/siNA sense region
uauuuacaauacauuagaa

SEQ ID NO: 891 - RNA, 19 nt, Artificial Sequence
  Description of Artificial Sequence:  Target Sequence/siNA sense region
aaguuacaugaugagcuua

SEQ ID NO: 892 - RNA, 19 nt, Artificial Sequence
  Description of Artificial Sequence:  Target Sequence/siNA sense region
acuggccacauguuggaca

SEQ ID NO: 893 - RNA, 19 nt, Artificial Sequence
  Description of Artificial Sequence:  Target Sequence/siNA sense region
auguauuccguaaugcuaa

SEQ ID NO: 894 - RNA, 19 nt, Artificial Sequence
  Description of Artificial Sequence:  Target Sequence/siNA sense region
acuaaugauaacaccucac

SEQ ID NO: 895 - RNA, 19 nt, Artificial Sequence
  Description of Artificial Sequence:  Target Sequence/siNA sense region
cgguacugggaaccugagu

SEQ ID NO: 896 - RNA, 19 nt, Artificial Sequence
  Description of Artificial Sequence:  Target Sequence/siNA sense region
uuuuaugaggcuauguaca

SEQ ID NO: 897 - RNA, 19 nt, Artificial Sequence
  Description of Artificial Sequence:  Target Sequence/siNA sense region
acaccacauacagucuugc

SEQ ID NO: 898 - RNA, 19 nt, Artificial Sequence
  Description of Artificial Sequence:  Target Sequence/siNA sense region
caggcuguaggugcuugug

SEQ ID NO: 899 - RNA, 19 nt, Artificial Sequence
  Description of Artificial Sequence:  Target Sequence/siNA sense region
guauugugcaauucacaga

SEQ ID NO: 900 - RNA, 19 nt, Artificial Sequence
  Description of Artificial Sequence:  Target Sequence/siNA sense region
acuucacuucguugcggug

SEQ ID NO: 901 - RNA, 19 nt, Artificial Sequence
  Description of Artificial Sequence:  Target Sequence/siNA sense region
gccuguauuaggagaccau

SEQ ID NO: 902 - RNA, 19 nt, Artificial Sequence
  Description of Artificial Sequence:  Target Sequence/siNA sense region
uuccuauguugcaagugcu

SEQ ID NO: 903 - RNA, 19 nt, Artificial Sequence
  Description of Artificial Sequence:  Target Sequence/siNA sense region
ugcuaugaccaugucauuu

SEQ ID NO: 904 - RNA, 19 nt, Artificial Sequence
  Description of Artificial Sequence:  Target Sequence/siNA sense region
ucaacaucacacaaauuag

SEQ ID NO: 905 - RNA, 19 nt, Artificial Sequence
  Description of Artificial Sequence:  Target Sequence/siNA sense region
guguugucuguuaaucccu

SEQ ID NO: 906 - RNA, 19 nt, Artificial Sequence
  Description of Artificial Sequence:  Target Sequence/siNA sense region
uauguuugcaaugccccag

SEQ ID NO: 907 - RNA, 19 nt, Artificial Sequence
  Description of Artificial Sequence:  Target Sequence/siNA sense region
gguugugaugucacugaug

SEQ ID NO: 908 - RNA, 19 nt, Artificial Sequence
  Description of Artificial Sequence:  Target Sequence/siNA sense region
gugacacaacuguaucuag

SEQ ID NO: 909 - RNA, 19 nt, Artificial Sequence
  Description of Artificial Sequence:  Target Sequence/siNA sense region
ggagguaugagcuauuauu

SEQ ID NO: 910 - RNA, 19 nt, Artificial Sequence
  Description of Artificial Sequence:  Target Sequence/siNA sense region
ugcaagucacauaagccuc

SEQ ID NO: 911 - RNA, 19 nt, Artificial Sequence
  Description of Artificial Sequence:  Target Sequence/siNA sense region
cccauuaguuuuccauuau

SEQ ID NO: 912 - RNA, 19 nt, Artificial Sequence
  Description of Artificial Sequence:  Target Sequence/siNA sense region
ugugcuaauggucagguuu

SEQ ID NO: 913 - RNA, 19 nt, Artificial Sequence
  Description of Artificial Sequence:  Target Sequence/siNA sense region
uuugguuuauacaaaaaca

SEQ ID NO: 914 - RNA, 19 nt, Artificial Sequence
  Description of Artificial Sequence:  Target Sequence/siNA sense region
acauguguaggcagugaca

SEQ ID NO: 915 - RNA, 19 nt, Artificial Sequence
  Description of Artificial Sequence:  Target Sequence/siNA sense region
aaugucacugacuucaaug

SEQ ID NO: 916 - RNA, 19 nt, Artificial Sequence
  Description of Artificial Sequence:  Target Sequence/siNA sense region
gcgauagcaacaugugauu

SEQ ID NO: 917 - RNA, 19 nt, Artificial Sequence
  Description of Artificial Sequence:  Target Sequence/siNA sense region
uggacuaaugcuggcgauu

SEQ ID NO: 918 - RNA, 19 nt, Artificial Sequence
  Description of Artificial Sequence:  Target Sequence/siNA sense region
uacauacuugccaacacuu

SEQ ID NO: 919 - RNA, 19 nt, Artificial Sequence
  Description of Artificial Sequence:  Target Sequence/siNA sense region
uguacugagagacucaagc

SEQ ID NO: 920 - RNA, 19 nt, Artificial Sequence
  Description of Artificial Sequence:  Target Sequence/siNA sense region
cuuuucgcagcagaaacgc

SEQ ID NO: 921 - RNA, 19 nt, Artificial Sequence
  Description of Artificial Sequence:  Target Sequence/siNA sense region
cucaaagccacugaggaaa

SEQ ID NO: 922 - RNA, 19 nt, Artificial Sequence
  Description of Artificial Sequence:  Target Sequence/siNA sense region
acauuuaagcugucauaug

SEQ ID NO: 923 - RNA, 19 nt, Artificial Sequence
  Description of Artificial Sequence:  Target Sequence/siNA sense region
gguauugccacuguacgcg

SEQ ID NO: 924 - RNA, 19 nt, Artificial Sequence
  Description of Artificial Sequence:  Target Sequence/siNA sense region
gaaguacucucugacagag

SEQ ID NO: 925 - RNA, 19 nt, Artificial Sequence
  Description of Artificial Sequence:  Target Sequence/siNA sense region
gaauugcaucuuucauggg

SEQ ID NO: 926 - RNA, 19 nt, Artificial Sequence
  Description of Artificial Sequence:  Target Sequence/siNA sense region
gagguuggaaaaccuagac

SEQ ID NO: 927 - RNA, 19 nt, Artificial Sequence
  Description of Artificial Sequence:  Target Sequence/siNA sense region
ccaccauugaacagaaacu

SEQ ID NO: 928 - RNA, 19 nt, Artificial Sequence
  Description of Artificial Sequence:  Target Sequence/siNA sense region
uaugucuuuacugguuacc

SEQ ID NO: 929 - RNA, 19 nt, Artificial Sequence
  Description of Artificial Sequence:  Target Sequence/siNA sense region
cguguaacuaaaaauagua

SEQ ID NO: 930 - RNA, 19 nt, Artificial Sequence
  Description of Artificial Sequence:  Target Sequence/siNA sense region
aaaguacagauuggagagu

SEQ ID NO: 931 - RNA, 19 nt, Artificial Sequence
  Description of Artificial Sequence:  Target Sequence/siNA sense region
uacaccuuugaaaaaggug

SEQ ID NO: 932 - RNA, 19 nt, Artificial Sequence
  Description of Artificial Sequence:  Target Sequence/siNA sense region
gacuauggugaugcuguug

SEQ ID NO: 933 - RNA, 19 nt, Artificial Sequence
  Description of Artificial Sequence:  Target Sequence/siNA sense region
guguacagagguacuacga

SEQ ID NO: 934 - RNA, 19 nt, Artificial Sequence
  Description of Artificial Sequence:  Target Sequence/siNA sense region
acauacaaguugaauguug

SEQ ID NO: 935 - RNA, 19 nt, Artificial Sequence
  Description of Artificial Sequence:  Target Sequence/siNA sense region
ggugauuacuuuguguuga

SEQ ID NO: 936 - RNA, 19 nt, Artificial Sequence
  Description of Artificial Sequence:  Target Sequence/siNA sense region
acaucucacacuguaaugc

SEQ ID NO: 937 - RNA, 19 nt, Artificial Sequence
  Description of Artificial Sequence:  Target Sequence/siNA sense region
ccacuuagugcaccuacuc

SEQ ID NO: 938 - RNA, 19 nt, Artificial Sequence
  Description of Artificial Sequence:  Target Sequence/siNA sense region
cuagugccacaagagcacu

SEQ ID NO: 939 - RNA, 19 nt, Artificial Sequence
  Description of Artificial Sequence:  Target Sequence/siNA sense region
uaugugagaauuacuggcu

SEQ ID NO: 940 - RNA, 19 nt, Artificial Sequence
  Description of Artificial Sequence:  Target Sequence/siNA sense region
uuguacccaacacucaaca

SEQ ID NO: 941 - RNA, 19 nt, Artificial Sequence
  Description of Artificial Sequence:  Target Sequence/siNA sense region
aucucagaugaguuuucua

SEQ ID NO: 942 - RNA, 19 nt, Artificial Sequence
  Description of Artificial Sequence:  Target Sequence/siNA sense region
agcaauguugcaaauuauc

SEQ ID NO: 943 - RNA, 19 nt, Artificial Sequence
  Description of Artificial Sequence:  Target Sequence/siNA sense region
caaaaggucggcaugcaaa

SEQ ID NO: 944 - RNA, 19 nt, Artificial Sequence
  Description of Artificial Sequence:  Target Sequence/siNA sense region
aaguacucuacacuccaag

SEQ ID NO: 945 - RNA, 19 nt, Artificial Sequence
  Description of Artificial Sequence:  Target Sequence/siNA sense region
ggaccaccugguacuggua

SEQ ID NO: 946 - RNA, 19 nt, Artificial Sequence
  Description of Artificial Sequence:  Target Sequence/siNA sense region
aagagucauuuugccaucg

SEQ ID NO: 947 - RNA, 19 nt, Artificial Sequence
  Description of Artificial Sequence:  Target Sequence/siNA sense region
ggacuugcucucuauuacc

SEQ ID NO: 948 - RNA, 19 nt, Artificial Sequence
  Description of Artificial Sequence:  Target Sequence/siNA sense region
ccaucugcucgcauagugu

SEQ ID NO: 949 - RNA, 19 nt, Artificial Sequence
  Description of Artificial Sequence:  Target Sequence/siNA sense region
uauacggcaugcucucaug

SEQ ID NO: 950 - RNA, 19 nt, Artificial Sequence
  Description of Artificial Sequence:  Target Sequence/siNA sense region
gcagcuguugaugcccuau

SEQ ID NO: 951 - RNA, 19 nt, Artificial Sequence
  Description of Artificial Sequence:  Target Sequence/siNA sense region
ugugaaaaggcauuaaaau

SEQ ID NO: 952 - RNA, 19 nt, Artificial Sequence
  Description of Artificial Sequence:  Target Sequence/siNA sense region
uauuugcccauagauaaau

SEQ ID NO: 953 - RNA, 19 nt, Artificial Sequence
  Description of Artificial Sequence:  Target Sequence/siNA sense region
uguaguagaaucauaccug

SEQ ID NO: 954 - RNA, 19 nt, Artificial Sequence
  Description of Artificial Sequence:  Target Sequence/siNA sense region
gcgcgugcgcgcguagagu

SEQ ID NO: 955 - RNA, 19 nt, Artificial Sequence
  Description of Artificial Sequence:  Target Sequence/siNA sense region
uguuuugauaaauucaaag

SEQ ID NO: 956 - RNA, 19 nt, Artificial Sequence
  Description of Artificial Sequence:  Target Sequence/siNA sense region
gugaauucaacacuagaac

SEQ ID NO: 957 - RNA, 19 nt, Artificial Sequence
  Description of Artificial Sequence:  Target Sequence/siNA sense region
caguauguuuucugcacug

SEQ ID NO: 958 - RNA, 19 nt, Artificial Sequence
  Description of Artificial Sequence:  Target Sequence/siNA sense region
guaaaugcauugccagaaa

SEQ ID NO: 959 - RNA, 19 nt, Artificial Sequence
  Description of Artificial Sequence:  Target Sequence/siNA sense region
acaacugcugacauuguag

SEQ ID NO: 960 - RNA, 19 nt, Artificial Sequence
  Description of Artificial Sequence:  Target Sequence/siNA sense region
gucuuugaugaaaucucua

SEQ ID NO: 961 - RNA, 19 nt, Artificial Sequence
  Description of Artificial Sequence:  Target Sequence/siNA sense region
auggcuacuaauuaugacu

SEQ ID NO: 962 - RNA, 19 nt, Artificial Sequence
  Description of Artificial Sequence:  Target Sequence/siNA sense region
uugaguguugucaaugcua

SEQ ID NO: 963 - RNA, 19 nt, Artificial Sequence
  Description of Artificial Sequence:  Target Sequence/siNA sense region
agacuucgugcaaaacacu

SEQ ID NO: 964 - RNA, 19 nt, Artificial Sequence
  Description of Artificial Sequence:  Target Sequence/siNA sense region
uacgucuauauuggcgauc

SEQ ID NO: 965 - RNA, 19 nt, Artificial Sequence
  Description of Artificial Sequence:  Target Sequence/siNA sense region
ccugcucaauuaccagccc

SEQ ID NO: 966 - RNA, 19 nt, Artificial Sequence
  Description of Artificial Sequence:  Target Sequence/siNA sense region
ccccgcacauugcugacua

SEQ ID NO: 967 - RNA, 19 nt, Artificial Sequence
  Description of Artificial Sequence:  Target Sequence/siNA sense region
aaaggcacacuagaaccag

SEQ ID NO: 968 - RNA, 19 nt, Artificial Sequence
  Description of Artificial Sequence:  Target Sequence/siNA sense region
gaauauuuuaauucagugu

SEQ ID NO: 969 - RNA, 19 nt, Artificial Sequence
  Description of Artificial Sequence:  Target Sequence/siNA sense region
ugcagacuuaugaaaacaa

SEQ ID NO: 970 - RNA, 19 nt, Artificial Sequence
  Description of Artificial Sequence:  Target Sequence/siNA sense region
auagguccagacauguucc

SEQ ID NO: 971 - RNA, 19 nt, Artificial Sequence
  Description of Artificial Sequence:  Target Sequence/siNA sense region
cuuggaacuugucgccguu

SEQ ID NO: 972 - RNA, 19 nt, Artificial Sequence
  Description of Artificial Sequence:  Target Sequence/siNA sense region
uguccugcugaaauuguug

SEQ ID NO: 973 - RNA, 19 nt, Artificial Sequence
  Description of Artificial Sequence:  Target Sequence/siNA sense region
gacacugugagugcuuuag

SEQ ID NO: 974 - RNA, 19 nt, Artificial Sequence
  Description of Artificial Sequence:  Target Sequence/siNA sense region
guuuaugacaauaagcuaa

SEQ ID NO: 975 - RNA, 19 nt, Artificial Sequence
  Description of Artificial Sequence:  Target Sequence/siNA sense region
aaagcacacaaggauaagu

SEQ ID NO: 976 - RNA, 19 nt, Artificial Sequence
  Description of Artificial Sequence:  Target Sequence/siNA sense region
ucagcucaaugcuucaaaa

SEQ ID NO: 977 - RNA, 19 nt, Artificial Sequence
  Description of Artificial Sequence:  Target Sequence/siNA sense region
auguucuacaaagguguua

SEQ ID NO: 978 - RNA, 19 nt, Artificial Sequence
  Description of Artificial Sequence:  Target Sequence/siNA sense region
auuacacaugauguuucau

SEQ ID NO: 979 - RNA, 19 nt, Artificial Sequence
  Description of Artificial Sequence:  Target Sequence/siNA sense region
ucugcaaucaacagaccuc

SEQ ID NO: 980 - RNA, 19 nt, Artificial Sequence
  Description of Artificial Sequence:  Target Sequence/siNA sense region
caaauaggcguuguaagag

SEQ ID NO: 981 - RNA, 19 nt, Artificial Sequence
  Description of Artificial Sequence:  Target Sequence/siNA sense region
gaauuucuuacacgcaauc

SEQ ID NO: 982 - RNA, 19 nt, Artificial Sequence
  Description of Artificial Sequence:  Target Sequence/siNA sense region
ccugcuuggagaaaagcug

SEQ ID NO: 983 - RNA, 19 nt, Artificial Sequence
  Description of Artificial Sequence:  Target Sequence/siNA sense region
guuuuuaucucaccuuaua

SEQ ID NO: 984 - RNA, 19 nt, Artificial Sequence
  Description of Artificial Sequence:  Target Sequence/siNA sense region
aauucacagaacgcuguag

SEQ ID NO: 985 - RNA, 19 nt, Artificial Sequence
  Description of Artificial Sequence:  Target Sequence/siNA sense region
gcuucaaaaaucuuaggau

SEQ ID NO: 986 - RNA, 19 nt, Artificial Sequence
  Description of Artificial Sequence:  Target Sequence/siNA sense region
uugccuacgcagacuguug

SEQ ID NO: 987 - RNA, 19 nt, Artificial Sequence
  Description of Artificial Sequence:  Target Sequence/siNA sense region
gauucaucacaggguucug

SEQ ID NO: 988 - RNA, 19 nt, Artificial Sequence
  Description of Artificial Sequence:  Target Sequence/siNA sense region
gaauaugacuaugucauau

SEQ ID NO: 989 - RNA, 19 nt, Artificial Sequence
  Description of Artificial Sequence:  Target Sequence/siNA sense region
uucacacaaacuacugaaa

SEQ ID NO: 990 - RNA, 19 nt, Artificial Sequence
  Description of Artificial Sequence:  Target Sequence/siNA sense region
acagcacacucuuguaaug

SEQ ID NO: 991 - RNA, 19 nt, Artificial Sequence
  Description of Artificial Sequence:  Target Sequence/siNA sense region
gucaaccgcuucaaugugg

SEQ ID NO: 992 - RNA, 19 nt, Artificial Sequence
  Description of Artificial Sequence:  Target Sequence/siNA sense region
gcuaucacaagggcaaaaa

SEQ ID NO: 993 - RNA, 19 nt, Artificial Sequence
  Description of Artificial Sequence:  Target Sequence/siNA sense region
auuggcauuuugugcauaa

SEQ ID NO: 994 - RNA, 19 nt, Artificial Sequence
  Description of Artificial Sequence:  Target Sequence/siNA sense region
augucugauagagaucuuu

SEQ ID NO: 995 - RNA, 19 nt, Artificial Sequence
  Description of Artificial Sequence:  Target Sequence/siNA sense region
uaugacaaacugcaauuua

SEQ ID NO: 996 - RNA, 19 nt, Artificial Sequence
  Description of Artificial Sequence:  Target Sequence/siNA sense region
acaagucuagaaauaccac

SEQ ID NO: 997 - RNA, 19 nt, Artificial Sequence
  Description of Artificial Sequence:  Target Sequence/siNA sense region
cgucgcaauguggcuacau

SEQ ID NO: 998 - RNA, 19 nt, Artificial Sequence
  Description of Artificial Sequence:  Target Sequence/siNA sense region
uuacaagcagaaaauguaa

SEQ ID NO: 999 - RNA, 19 nt, Artificial Sequence
  Description of Artificial Sequence:  Target Sequence/siNA sense region
acuggacuuuuuaaggacu

SEQ ID NO: 1000 - RNA, 19 nt, Artificial Sequence
  Description of Artificial Sequence:  Target Sequence/siNA sense region
uguaguaagaucauuacug

SEQ ID NO: 1001 - RNA, 19 nt, Artificial Sequence
  Description of Artificial Sequence:  Target Sequence/siNA sense region
ggucuucauccuacacagg

SEQ ID NO: 1002 - RNA, 19 nt, Artificial Sequence
  Description of Artificial Sequence:  Target Sequence/siNA sense region
gcaccuacacaccucagcg

SEQ ID NO: 1003 - RNA, 19 nt, Artificial Sequence
  Description of Artificial Sequence:  Target Sequence/siNA sense region
guugauauaaaguucaaga

SEQ ID NO: 1004 - RNA, 19 nt, Artificial Sequence
  Description of Artificial Sequence:  Target Sequence/siNA sense region
acugaaggauuauguguug

SEQ ID NO: 1005 - RNA, 19 nt, Artificial Sequence
  Description of Artificial Sequence:  Target Sequence/siNA sense region
gacauaccaggcauaccaa

SEQ ID NO: 1006 - RNA, 19 nt, Artificial Sequence
  Description of Artificial Sequence:  Target Sequence/siNA sense region
aaggacaugaccuaccgua

SEQ ID NO: 1007 - RNA, 19 nt, Artificial Sequence
  Description of Artificial Sequence:  Target Sequence/siNA sense region
agacucaucucuaugaugg

SEQ ID NO: 1008 - RNA, 19 nt, Artificial Sequence
  Description of Artificial Sequence:  Target Sequence/siNA sense region
gguuucaaaaugaauuacc

SEQ ID NO: 1009 - RNA, 19 nt, Artificial Sequence
  Description of Artificial Sequence:  Target Sequence/siNA sense region
caagucaaugguuacccua

SEQ ID NO: 1010 - RNA, 19 nt, Artificial Sequence
  Description of Artificial Sequence:  Target Sequence/siNA sense region
aauauguuuaucacccgcg

SEQ ID NO: 1011 - RNA, 19 nt, Artificial Sequence
  Description of Artificial Sequence:  Target Sequence/siNA sense region
gaagaagcuauucgucacg

SEQ ID NO: 1012 - RNA, 19 nt, Artificial Sequence
  Description of Artificial Sequence:  Target Sequence/siNA sense region
guucgugcguggauuggcu

SEQ ID NO: 1013 - RNA, 19 nt, Artificial Sequence
  Description of Artificial Sequence:  Target Sequence/siNA sense region
uuugauguagagggcuguc

SEQ ID NO: 1014 - RNA, 19 nt, Artificial Sequence
  Description of Artificial Sequence:  Target Sequence/siNA sense region
caugcaacuagagaugcug

SEQ ID NO: 1015 - RNA, 19 nt, Artificial Sequence
  Description of Artificial Sequence:  Target Sequence/siNA sense region
guggguacuaaccuaccuc

SEQ ID NO: 1016 - RNA, 19 nt, Artificial Sequence
  Description of Artificial Sequence:  Target Sequence/siNA sense region
cuccagcuaggauuuucua

SEQ ID NO: 1017 - RNA, 19 nt, Artificial Sequence
  Description of Artificial Sequence:  Target Sequence/siNA sense region
acagguguuaacuuaguag

SEQ ID NO: 1018 - RNA, 19 nt, Artificial Sequence
  Description of Artificial Sequence:  Target Sequence/siNA sense region
gcuguaccgacugguuaug

SEQ ID NO: 1019 - RNA, 19 nt, Artificial Sequence
  Description of Artificial Sequence:  Target Sequence/siNA sense region
guugacacugaaaauaaca

SEQ ID NO: 1020 - RNA, 19 nt, Artificial Sequence
  Description of Artificial Sequence:  Target Sequence/siNA sense region
acagaauucaccagaguua

SEQ ID NO: 1021 - RNA, 19 nt, Artificial Sequence
  Description of Artificial Sequence:  Target Sequence/siNA sense region
aaugcaaaaccuccaccag

SEQ ID NO: 1022 - RNA, 19 nt, Artificial Sequence
  Description of Artificial Sequence:  Target Sequence/siNA sense region
ggugaccaguuuaaacauc

SEQ ID NO: 1023 - RNA, 19 nt, Artificial Sequence
  Description of Artificial Sequence:  Target Sequence/siNA sense region
cuuauaccacucauguaua

SEQ ID NO: 1024 - RNA, 19 nt, Artificial Sequence
  Description of Artificial Sequence:  Target Sequence/siNA sense region
aaaggcuugcccuggaaug

SEQ ID NO: 1025 - RNA, 19 nt, Artificial Sequence
  Description of Artificial Sequence:  Target Sequence/siNA sense region
guagugcguauuaagauag

SEQ ID NO: 1026 - RNA, 19 nt, Artificial Sequence
  Description of Artificial Sequence:  Target Sequence/siNA sense region
guacaaaugcucagugaua

SEQ ID NO: 1027 - RNA, 19 nt, Artificial Sequence
  Description of Artificial Sequence:  Target Sequence/siNA sense region
acacugaaaggauugucag

SEQ ID NO: 1028 - RNA, 19 nt, Artificial Sequence
  Description of Artificial Sequence:  Target Sequence/siNA sense region
gacagagucguguucgucc

SEQ ID NO: 1029 - RNA, 19 nt, Artificial Sequence
  Description of Artificial Sequence:  Target Sequence/siNA sense region
cuuugggcgcauggcuuug

SEQ ID NO: 1030 - RNA, 19 nt, Artificial Sequence
  Description of Artificial Sequence:  Target Sequence/siNA sense region
gagcuuacaucaaugaagu

SEQ ID NO: 1031 - RNA, 19 nt, Artificial Sequence
  Description of Artificial Sequence:  Target Sequence/siNA sense region
uacuuugucaagauuggac

SEQ ID NO: 1032 - RNA, 19 nt, Artificial Sequence
  Description of Artificial Sequence:  Target Sequence/siNA sense region
ccugaaagaacguguuguc

SEQ ID NO: 1033 - RNA, 19 nt, Artificial Sequence
  Description of Artificial Sequence:  Target Sequence/siNA sense region
cugugugacaaacgugcaa

SEQ ID NO: 1034 - RNA, 19 nt, Artificial Sequence
  Description of Artificial Sequence:  Target Sequence/siNA sense region
acuugcuuuucuacuucau

SEQ ID NO: 1035 - RNA, 19 nt, Artificial Sequence
  Description of Artificial Sequence:  Target Sequence/siNA sense region
ucagauacuuaugccugcu

SEQ ID NO: 1036 - RNA, 19 nt, Artificial Sequence
  Description of Artificial Sequence:  Target Sequence/siNA sense region
uggaaucauucuguggguu

SEQ ID NO: 1037 - RNA, 19 nt, Artificial Sequence
  Description of Artificial Sequence:  Target Sequence/siNA sense region
uuugacuaugucuauaacc

SEQ ID NO: 1038 - RNA, 19 nt, Artificial Sequence
  Description of Artificial Sequence:  Target Sequence/siNA sense region
ccauuuaugauugauguuc

SEQ ID NO: 1039 - RNA, 19 nt, Artificial Sequence
  Description of Artificial Sequence:  Target Sequence/siNA sense region
cagcaguggggcuuuacgg

SEQ ID NO: 1040 - RNA, 19 nt, Artificial Sequence
  Description of Artificial Sequence:  Target Sequence/siNA sense region
gguaaccuucagaguaacc

SEQ ID NO: 1041 - RNA, 19 nt, Artificial Sequence
  Description of Artificial Sequence:  Target Sequence/siNA sense region
caugaccaacauugccagg

SEQ ID NO: 1042 - RNA, 19 nt, Artificial Sequence
  Description of Artificial Sequence:  Target Sequence/siNA sense region
guacauggaaaugcacaug

SEQ ID NO: 1043 - RNA, 19 nt, Artificial Sequence
  Description of Artificial Sequence:  Target Sequence/siNA sense region
guggcuaguugugaugcua

SEQ ID NO: 1044 - RNA, 19 nt, Artificial Sequence
  Description of Artificial Sequence:  Target Sequence/siNA sense region
aucaugacuagauguuuag

SEQ ID NO: 1045 - RNA, 19 nt, Artificial Sequence
  Description of Artificial Sequence:  Target Sequence/siNA sense region
gcaguccaugagugcuuug

SEQ ID NO: 1046 - RNA, 19 nt, Artificial Sequence
  Description of Artificial Sequence:  Target Sequence/siNA sense region
guuaagcgcguugauuggu

SEQ ID NO: 1047 - RNA, 19 nt, Artificial Sequence
  Description of Artificial Sequence:  Target Sequence/siNA sense region
ucuguugaauacccuauua

SEQ ID NO: 1048 - RNA, 19 nt, Artificial Sequence
  Description of Artificial Sequence:  Target Sequence/siNA sense region
auaggagaugaacugaggg

SEQ ID NO: 1049 - RNA, 19 nt, Artificial Sequence
  Description of Artificial Sequence:  Target Sequence/siNA sense region
guuaauucugcuugcagaa

SEQ ID NO: 1050 - RNA, 19 nt, Artificial Sequence
  Description of Artificial Sequence:  Target Sequence/siNA sense region
aaaguacaacacaugguug

SEQ ID NO: 1051 - RNA, 19 nt, Artificial Sequence
  Description of Artificial Sequence:  Target Sequence/siNA sense region
gugaagucugcauugcuug

SEQ ID NO: 1052 - RNA, 19 nt, Artificial Sequence
  Description of Artificial Sequence:  Target Sequence/siNA sense region
gcugauaaguuuccaguuc

SEQ ID NO: 1053 - RNA, 19 nt, Artificial Sequence
  Description of Artificial Sequence:  Target Sequence/siNA sense region
cuucaugacauuggaaauc

SEQ ID NO: 1054 - RNA, 19 nt, Artificial Sequence
  Description of Artificial Sequence:  Target Sequence/siNA sense region
ccaaaggcuaucaagugug

SEQ ID NO: 1055 - RNA, 19 nt, Artificial Sequence
  Description of Artificial Sequence:  Target Sequence/siNA sense region
gugccucaggcugaaguag

SEQ ID NO: 1056 - RNA, 19 nt, Artificial Sequence
  Description of Artificial Sequence:  Target Sequence/siNA sense region
gaauggaaguucuacgaug

SEQ ID NO: 1057 - RNA, 19 nt, Artificial Sequence
  Description of Artificial Sequence:  Target Sequence/siNA sense region
gcucagccauguagugaca

SEQ ID NO: 1058 - RNA, 19 nt, Artificial Sequence
  Description of Artificial Sequence:  Target Sequence/siNA sense region
aaagcuuacaaaauagagg

SEQ ID NO: 1059 - RNA, 19 nt, Artificial Sequence
  Description of Artificial Sequence:  Target Sequence/siNA sense region
gaacucuucuauucuuaug

SEQ ID NO: 1060 - RNA, 19 nt, Artificial Sequence
  Description of Artificial Sequence:  Target Sequence/siNA sense region
gcuacacaucacgauaaau

SEQ ID NO: 1061 - RNA, 19 nt, Artificial Sequence
  Description of Artificial Sequence:  Target Sequence/siNA sense region
uucacugaugguguuuguu

SEQ ID NO: 1062 - RNA, 19 nt, Artificial Sequence
  Description of Artificial Sequence:  Target Sequence/siNA sense region
uuguuuuggaauuguaacg

SEQ ID NO: 1063 - RNA, 19 nt, Artificial Sequence
  Description of Artificial Sequence:  Target Sequence/siNA sense region
guugaucguuacccagcca

SEQ ID NO: 1064 - RNA, 19 nt, Artificial Sequence
  Description of Artificial Sequence:  Target Sequence/siNA sense region
aaugcaauuguguguaggu

SEQ ID NO: 1065 - RNA, 19 nt, Artificial Sequence
  Description of Artificial Sequence:  Target Sequence/siNA sense region
uuugacacaagagucuugu

SEQ ID NO: 1066 - RNA, 19 nt, Artificial Sequence
  Description of Artificial Sequence:  Target Sequence/siNA sense region
ucaaacuugaacuuaccag

SEQ ID NO: 1067 - RNA, 19 nt, Artificial Sequence
  Description of Artificial Sequence:  Target Sequence/siNA sense region
ggcugugauggugguaguu

SEQ ID NO: 1068 - RNA, 19 nt, Artificial Sequence
  Description of Artificial Sequence:  Target Sequence/siNA sense region
uuguaugugaauaagcaug

SEQ ID NO: 1069 - RNA, 19 nt, Artificial Sequence
  Description of Artificial Sequence:  Target Sequence/siNA sense region
gcauuccacacuccagcuu

SEQ ID NO: 1070 - RNA, 19 nt, Artificial Sequence
  Description of Artificial Sequence:  Target Sequence/siNA sense region
uucgauaaaagugcauuua

SEQ ID NO: 1071 - RNA, 19 nt, Artificial Sequence
  Description of Artificial Sequence:  Target Sequence/siNA sense region
acuaauuuaaagcaauugc

SEQ ID NO: 1072 - RNA, 19 nt, Artificial Sequence
  Description of Artificial Sequence:  Target Sequence/siNA sense region
ccuuucuuuuacuauucug

SEQ ID NO: 1073 - RNA, 19 nt, Artificial Sequence
  Description of Artificial Sequence:  Target Sequence/siNA sense region
gauaguccuugugagucuc

SEQ ID NO: 1074 - RNA, 19 nt, Artificial Sequence
  Description of Artificial Sequence:  Target Sequence/siNA sense region
cauggcaaacaaguagugu

SEQ ID NO: 1075 - RNA, 19 nt, Artificial Sequence
  Description of Artificial Sequence:  Target Sequence/siNA sense region
ucggauauugauuauguuc

SEQ ID NO: 1076 - RNA, 19 nt, Artificial Sequence
  Description of Artificial Sequence:  Target Sequence/siNA sense region
ccacucaaaucugcuacgu

SEQ ID NO: 1077 - RNA, 19 nt, Artificial Sequence
  Description of Artificial Sequence:  Target Sequence/siNA sense region
uguauuacacgaugcaauu

SEQ ID NO: 1078 - RNA, 19 nt, Artificial Sequence
  Description of Artificial Sequence:  Target Sequence/siNA sense region
uuagguggugcuguuugca

SEQ ID NO: 1079 - RNA, 19 nt, Artificial Sequence
  Description of Artificial Sequence:  Target Sequence/siNA sense region
agacaccaugcaaaugagu

SEQ ID NO: 1080 - RNA, 19 nt, Artificial Sequence
  Description of Artificial Sequence:  Target Sequence/siNA sense region
uaccgacaguacuuggaug

SEQ ID NO: 1081 - RNA, 19 nt, Artificial Sequence
  Description of Artificial Sequence:  Target Sequence/siNA sense region
gcauauaauaugaugauuu

SEQ ID NO: 1082 - RNA, 19 nt, Artificial Sequence
  Description of Artificial Sequence:  Target Sequence/siNA sense region
ucugcuggauuuagccuau

SEQ ID NO: 1083 - RNA, 19 nt, Artificial Sequence
  Description of Artificial Sequence:  Target Sequence/siNA sense region
uggauuuacaaacaauuug

SEQ ID NO: 1084 - RNA, 19 nt, Artificial Sequence
  Description of Artificial Sequence:  Target Sequence/siNA sense region
gauacuuauaaccugugga

SEQ ID NO: 1085 - RNA, 19 nt, Artificial Sequence
  Description of Artificial Sequence:  Target Sequence/siNA sense region
aauacauuuaccagguuac

SEQ ID NO: 1086 - RNA, 19 nt, Artificial Sequence
  Description of Artificial Sequence:  Target Sequence/siNA sense region
cagaguuuagaaaaugugg

SEQ ID NO: 1087 - RNA, 19 nt, Artificial Sequence
  Description of Artificial Sequence:  Target Sequence/siNA sense region
gcuuauaauguuguuaaua

SEQ ID NO: 1088 - RNA, 19 nt, Artificial Sequence
  Description of Artificial Sequence:  Target Sequence/siNA sense region
aaaggacacuuugauggac

SEQ ID NO: 1089 - RNA, 19 nt, Artificial Sequence
  Description of Artificial Sequence:  Target Sequence/siNA sense region
cacgccggcgaagcaccug

SEQ ID NO: 1090 - RNA, 19 nt, Artificial Sequence
  Description of Artificial Sequence:  Target Sequence/siNA sense region
guuuccaucauuaauaaug

SEQ ID NO: 1091 - RNA, 19 nt, Artificial Sequence
  Description of Artificial Sequence:  Target Sequence/siNA sense region
gcuguuuacacaaagguag

SEQ ID NO: 1092 - RNA, 19 nt, Artificial Sequence
  Description of Artificial Sequence:  Target Sequence/siNA sense region
gaugguauugauguggaga

SEQ ID NO: 1093 - RNA, 19 nt, Artificial Sequence
  Description of Artificial Sequence:  Target Sequence/siNA sense region
aucuuugaaaauaagacaa

SEQ ID NO: 1094 - RNA, 19 nt, Artificial Sequence
  Description of Artificial Sequence:  Target Sequence/siNA sense region
acacuuccuguuaauguug

SEQ ID NO: 1095 - RNA, 19 nt, Artificial Sequence
  Description of Artificial Sequence:  Target Sequence/siNA sense region
gcauuugagcuuugggcua

SEQ ID NO: 1096 - RNA, 19 nt, Artificial Sequence
  Description of Artificial Sequence:  Target Sequence/siNA sense region
aagcguaacauuaaaccag

SEQ ID NO: 1097 - RNA, 19 nt, Artificial Sequence
  Description of Artificial Sequence:  Target Sequence/siNA sense region
gugccagagauuaagauac

SEQ ID NO: 1098 - RNA, 19 nt, Artificial Sequence
  Description of Artificial Sequence:  Target Sequence/siNA sense region
cucaauaauuuggguguug

SEQ ID NO: 1099 - RNA, 19 nt, Artificial Sequence
  Description of Artificial Sequence:  Target Sequence/siNA sense region
gauaucgcugcuaauacug

SEQ ID NO: 1100 - RNA, 19 nt, Artificial Sequence
  Description of Artificial Sequence:  Target Sequence/siNA sense region
guaaucugggacuacaaaa

SEQ ID NO: 1101 - RNA, 19 nt, Artificial Sequence
  Description of Artificial Sequence:  Target Sequence/siNA sense region
agagaagccccagcacaug

SEQ ID NO: 1102 - RNA, 19 nt, Artificial Sequence
  Description of Artificial Sequence:  Target Sequence/siNA sense region
guaucuacaauaggugucu

SEQ ID NO: 1103 - RNA, 19 nt, Artificial Sequence
  Description of Artificial Sequence:  Target Sequence/siNA sense region
ugcacaaugacugacauug

SEQ ID NO: 1104 - RNA, 19 nt, Artificial Sequence
  Description of Artificial Sequence:  Target Sequence/siNA sense region
gccaagaaaccuacugaga

SEQ ID NO: 1105 - RNA, 19 nt, Artificial Sequence
  Description of Artificial Sequence:  Target Sequence/siNA sense region
agugcuuguucuucacuua

SEQ ID NO: 1106 - RNA, 19 nt, Artificial Sequence
  Description of Artificial Sequence:  Target Sequence/siNA sense region
acugucuuguuugauggua

SEQ ID NO: 1107 - RNA, 19 nt, Artificial Sequence
  Description of Artificial Sequence:  Target Sequence/siNA sense region
agaguggaaggacagguag

SEQ ID NO: 1108 - RNA, 19 nt, Artificial Sequence
  Description of Artificial Sequence:  Target Sequence/siNA sense region
gaccuuuuuagaaacgccc

SEQ ID NO: 1109 - RNA, 19 nt, Artificial Sequence
  Description of Artificial Sequence:  Target Sequence/siNA sense region
cguaaugguguuuuaauaa

SEQ ID NO: 1110 - RNA, 19 nt, Artificial Sequence
  Description of Artificial Sequence:  Target Sequence/siNA sense region
acagaagguucagucaaag

SEQ ID NO: 1111 - RNA, 19 nt, Artificial Sequence
  Description of Artificial Sequence:  Target Sequence/siNA sense region
ggucuaacaccuucaaagg

SEQ ID NO: 1112 - RNA, 19 nt, Artificial Sequence
  Description of Artificial Sequence:  Target Sequence/siNA sense region
ggaccagcacaagcuagcg

SEQ ID NO: 1113 - RNA, 19 nt, Artificial Sequence
  Description of Artificial Sequence:  Target Sequence/siNA sense region
gucaauggagucacauuaa

SEQ ID NO: 1114 - RNA, 19 nt, Artificial Sequence
  Description of Artificial Sequence:  Target Sequence/siNA sense region
auuggagaaucaguaaaaa

SEQ ID NO: 1115 - RNA, 19 nt, Artificial Sequence
  Description of Artificial Sequence:  Target Sequence/siNA sense region
acacaguuuaacuacuuua

SEQ ID NO: 1116 - RNA, 19 nt, Artificial Sequence
  Description of Artificial Sequence:  Target Sequence/siNA sense region
aagaaaguagacggcauua

SEQ ID NO: 1117 - RNA, 19 nt, Artificial Sequence
  Description of Artificial Sequence:  Target Sequence/siNA sense region
auucaacaguugccugaaa

SEQ ID NO: 1118 - RNA, 19 nt, Artificial Sequence
  Description of Artificial Sequence:  Target Sequence/siNA sense region
accuacuuuacucagagca

SEQ ID NO: 1119 - RNA, 19 nt, Artificial Sequence
  Description of Artificial Sequence:  Target Sequence/siNA sense region
agagacuuagaggauuuua

SEQ ID NO: 1120 - RNA, 19 nt, Artificial Sequence
  Description of Artificial Sequence:  Target Sequence/siNA sense region
aagcccagaucacaaaugg

SEQ ID NO: 1121 - RNA, 19 nt, Artificial Sequence
  Description of Artificial Sequence:  Target Sequence/siNA sense region
gaaacugacuuucucgagc

SEQ ID NO: 1122 - RNA, 19 nt, Artificial Sequence
  Description of Artificial Sequence:  Target Sequence/siNA sense region
cucgcuauggaugaauuca

SEQ ID NO: 1123 - RNA, 19 nt, Artificial Sequence
  Description of Artificial Sequence:  Target Sequence/siNA sense region
auacagcgauauaagcucg

SEQ ID NO: 1124 - RNA, 19 nt, Artificial Sequence
  Description of Artificial Sequence:  Target Sequence/siNA sense region
gagggcuaugccuucgaac

SEQ ID NO: 1125 - RNA, 19 nt, Artificial Sequence
  Description of Artificial Sequence:  Target Sequence/siNA sense region
cacaucguuuauggagauu

SEQ ID NO: 1126 - RNA, 19 nt, Artificial Sequence
  Description of Artificial Sequence:  Target Sequence/siNA sense region
uucagucauggacaacuug

SEQ ID NO: 1127 - RNA, 19 nt, Artificial Sequence
  Description of Artificial Sequence:  Target Sequence/siNA sense region
ggcggucuucauuuaauga

SEQ ID NO: 1128 - RNA, 19 nt, Artificial Sequence
  Description of Artificial Sequence:  Target Sequence/siNA sense region
auaggcuuagccaagcgcu

SEQ ID NO: 1129 - RNA, 19 nt, Artificial Sequence
  Description of Artificial Sequence:  Target Sequence/siNA sense region
ucacaagauucaccacuua

SEQ ID NO: 1130 - RNA, 19 nt, Artificial Sequence
  Description of Artificial Sequence:  Target Sequence/siNA sense region
aaauuagaggauuuuaucc

SEQ ID NO: 1131 - RNA, 19 nt, Artificial Sequence
  Description of Artificial Sequence:  Target Sequence/siNA sense region
ccuauggacagcacaguga

SEQ ID NO: 1132 - RNA, 19 nt, Artificial Sequence
  Description of Artificial Sequence:  Target Sequence/siNA sense region
aaaaauuacuucauaacag

SEQ ID NO: 1133 - RNA, 19 nt, Artificial Sequence
  Description of Artificial Sequence:  Target Sequence/siNA sense region
gaugcgcaaacagguucau

SEQ ID NO: 1134 - RNA, 19 nt, Artificial Sequence
  Description of Artificial Sequence:  Target Sequence/siNA sense region
ucaaaauguguguguucug

SEQ ID NO: 1135 - RNA, 19 nt, Artificial Sequence
  Description of Artificial Sequence:  Target Sequence/siNA sense region
gugauugaucuuuuacuug

SEQ ID NO: 1136 - RNA, 19 nt, Artificial Sequence
  Description of Artificial Sequence:  Target Sequence/siNA sense region
gaugacuuugucgagauaa

SEQ ID NO: 1137 - RNA, 19 nt, Artificial Sequence
  Description of Artificial Sequence:  Target Sequence/siNA sense region
auaaagucacaagauuugu

SEQ ID NO: 1138 - RNA, 19 nt, Artificial Sequence
  Description of Artificial Sequence:  Target Sequence/siNA sense region
ucagugauuucaaaagugg

SEQ ID NO: 1139 - RNA, 19 nt, Artificial Sequence
  Description of Artificial Sequence:  Target Sequence/siNA sense region
gucaagguuacaauugacu

SEQ ID NO: 1140 - RNA, 19 nt, Artificial Sequence
  Description of Artificial Sequence:  Target Sequence/siNA sense region
uaugcugaaauuucauuca

SEQ ID NO: 1141 - RNA, 19 nt, Artificial Sequence
  Description of Artificial Sequence:  Target Sequence/siNA sense region
augcuuugguguaaggaug

SEQ ID NO: 1142 - RNA, 19 nt, Artificial Sequence
  Description of Artificial Sequence:  Target Sequence/siNA sense region
ggacauguugaaaccuucu

SEQ ID NO: 1143 - RNA, 19 nt, Artificial Sequence
  Description of Artificial Sequence:  Target Sequence/siNA sense region
uacccaaaacuacaagcaa

SEQ ID NO: 1144 - RNA, 19 nt, Artificial Sequence
  Description of Artificial Sequence:  Target Sequence/siNA sense region
agucgagcguggcaaccag

SEQ ID NO: 1145 - RNA, 19 nt, Artificial Sequence
  Description of Artificial Sequence:  Target Sequence/siNA sense region
gguguugcgaugccuaacu

SEQ ID NO: 1146 - RNA, 19 nt, Artificial Sequence
  Description of Artificial Sequence:  Target Sequence/siNA sense region
uuguacaagaugcaaagaa

SEQ ID NO: 1147 - RNA, 19 nt, Artificial Sequence
  Description of Artificial Sequence:  Target Sequence/siNA sense region
augcuucuugaaaagugug

SEQ ID NO: 1148 - RNA, 19 nt, Artificial Sequence
  Description of Artificial Sequence:  Target Sequence/siNA sense region
gaccuucagaauuauggug

SEQ ID NO: 1149 - RNA, 19 nt, Artificial Sequence
  Description of Artificial Sequence:  Target Sequence/siNA sense region
gaaaaugcuguuauaccaa

SEQ ID NO: 1150 - RNA, 19 nt, Artificial Sequence
  Description of Artificial Sequence:  Target Sequence/siNA sense region
aaaggaauaaugaugaaug

SEQ ID NO: 1151 - RNA, 19 nt, Artificial Sequence
  Description of Artificial Sequence:  Target Sequence/siNA sense region
gucgcaaaguauacucaac

SEQ ID NO: 1152 - RNA, 19 nt, Artificial Sequence
  Description of Artificial Sequence:  Target Sequence/siNA sense region
cugugucaauacuuaaaua

SEQ ID NO: 1153 - RNA, 19 nt, Artificial Sequence
  Description of Artificial Sequence:  Target Sequence/siNA sense region
acacuuacuuuagcuguac

SEQ ID NO: 1154 - RNA, 19 nt, Artificial Sequence
  Description of Artificial Sequence:  Target Sequence/siNA sense region
cccuacaacaugagaguua

SEQ ID NO: 1155 - RNA, 19 nt, Artificial Sequence
  Description of Artificial Sequence:  Target Sequence/siNA sense region
auucacuuuggugcuggcu

SEQ ID NO: 1156 - RNA, 19 nt, Artificial Sequence
  Description of Artificial Sequence:  Target Sequence/siNA sense region
ucugauaaaggaguugcac

SEQ ID NO: 1157 - RNA, 19 nt, Artificial Sequence
  Description of Artificial Sequence:  Target Sequence/siNA sense region
ccagguacagcugugcuca

SEQ ID NO: 1158 - RNA, 19 nt, Artificial Sequence
  Description of Artificial Sequence:  Target Sequence/siNA sense region
agacaaugguugccaacug

SEQ ID NO: 1159 - RNA, 19 nt, Artificial Sequence
  Description of Artificial Sequence:  Target Sequence/siNA sense region
ggcacacuacuugucgauu

SEQ ID NO: 1160 - RNA, 19 nt, Artificial Sequence
  Description of Artificial Sequence:  Target Sequence/siNA sense region
ucagaucuuaaugacuucg

SEQ ID NO: 1161 - RNA, 19 nt, Artificial Sequence
  Description of Artificial Sequence:  Target Sequence/siNA sense region
gucuccgacgcauauucua

SEQ ID NO: 1162 - RNA, 19 nt, Artificial Sequence
  Description of Artificial Sequence:  Target Sequence/siNA sense region
acuuuaauuggagacugug

SEQ ID NO: 1163 - RNA, 19 nt, Artificial Sequence
  Description of Artificial Sequence:  Target Sequence/siNA sense region
gcaacaguacauacggcua

SEQ ID NO: 1164 - RNA, 19 nt, Artificial Sequence
  Description of Artificial Sequence:  Target Sequence/siNA sense region
aauaaaugggaccuuauua

SEQ ID NO: 1165 - RNA, 19 nt, Artificial Sequence
  Description of Artificial Sequence:  Target Sequence/siNA sense region
auuagcgauauguaugacc

SEQ ID NO: 1166 - RNA, 19 nt, Artificial Sequence
  Description of Artificial Sequence:  Target Sequence/siNA sense region
ccuaggaccaaacauguga

SEQ ID NO: 1167 - RNA, 19 nt, Artificial Sequence
  Description of Artificial Sequence:  Target Sequence/siNA sense region
acaaaagagaaugacucua

SEQ ID NO: 1168 - RNA, 19 nt, Artificial Sequence
  Description of Artificial Sequence:  Target Sequence/siNA sense region
aaagaaggguuuuucacuu

SEQ ID NO: 1169 - RNA, 19 nt, Artificial Sequence
  Description of Artificial Sequence:  Target Sequence/siNA sense region
uaucuguguggauuuauaa

SEQ ID NO: 1170 - RNA, 19 nt, Artificial Sequence
  Description of Artificial Sequence:  Target Sequence/siNA sense region
aagcaaaaacuagcccugg

SEQ ID NO: 1171 - RNA, 19 nt, Artificial Sequence
  Description of Artificial Sequence:  Target Sequence/siNA sense region
ggugguucuauagcuguaa

SEQ ID NO: 1172 - RNA, 19 nt, Artificial Sequence
  Description of Artificial Sequence:  Target Sequence/siNA sense region
aagauaacagagcauucuu

SEQ ID NO: 1173 - RNA, 19 nt, Artificial Sequence
  Description of Artificial Sequence:  Target Sequence/siNA sense region
uggaaugcugaccuuuaca

SEQ ID NO: 1174 - RNA, 19 nt, Artificial Sequence
  Description of Artificial Sequence:  Target Sequence/siNA sense region
aagcuuaugggccauuucu

SEQ ID NO: 1175 - RNA, 19 nt, Artificial Sequence
  Description of Artificial Sequence:  Target Sequence/siNA sense region
ucaugguggacagcuuuug

SEQ ID NO: 1176 - RNA, 19 nt, Artificial Sequence
  Description of Artificial Sequence:  Target Sequence/siNA sense region
guuacaaauguaaaugcau

SEQ ID NO: 1177 - RNA, 19 nt, Artificial Sequence
  Description of Artificial Sequence:  Target Sequence/siNA sense region
ucaucaucggaagcauuuu

SEQ ID NO: 1178 - RNA, 19 nt, Artificial Sequence
  Description of Artificial Sequence:  Target Sequence/siNA sense region
uuaauuggggcuaacuauc

SEQ ID NO: 1179 - RNA, 19 nt, Artificial Sequence
  Description of Artificial Sequence:  Target Sequence/siNA sense region
cuuggcaagccgaaggaac

SEQ ID NO: 1180 - RNA, 19 nt, Artificial Sequence
  Description of Artificial Sequence:  Target Sequence/siNA sense region
caaauugauggcuauacca

SEQ ID NO: 1181 - RNA, 19 nt, Artificial Sequence
  Description of Artificial Sequence:  Target Sequence/siNA sense region
augcaugcuaacuacauuu

SEQ ID NO: 1182 - RNA, 19 nt, Artificial Sequence
  Description of Artificial Sequence:  Target Sequence/siNA sense region
uucuggaggaacacaaauc

SEQ ID NO: 1183 - RNA, 19 nt, Artificial Sequence
  Description of Artificial Sequence:  Target Sequence/siNA sense region
ccuauccaguugucuuccu

SEQ ID NO: 1184 - RNA, 19 nt, Artificial Sequence
  Description of Artificial Sequence:  Target Sequence/siNA sense region
uauucacucuuugacauga

SEQ ID NO: 1185 - RNA, 19 nt, Artificial Sequence
  Description of Artificial Sequence:  Target Sequence/siNA sense region
agcaaauuuccucuuaaau

SEQ ID NO: 1186 - RNA, 19 nt, Artificial Sequence
  Description of Artificial Sequence:  Target Sequence/siNA sense region
uuaagaggaacugcuguaa

SEQ ID NO: 1187 - RNA, 19 nt, Artificial Sequence
  Description of Artificial Sequence:  Target Sequence/siNA sense region
augucucuuaaggagaauc

SEQ ID NO: 1188 - RNA, 19 nt, Artificial Sequence
  Description of Artificial Sequence:  Target Sequence/siNA sense region
caaaucaaugauaugauuu

SEQ ID NO: 1189 - RNA, 19 nt, Artificial Sequence
  Description of Artificial Sequence:  Target Sequence/siNA sense region
uauucucuucuggaaaaag

SEQ ID NO: 1190 - RNA, 19 nt, Artificial Sequence
  Description of Artificial Sequence:  Target Sequence/siNA sense region
gguaggcuuaucauuagag

SEQ ID NO: 1191 - RNA, 19 nt, Artificial Sequence
  Description of Artificial Sequence:  Target Sequence/siNA sense region
gaaaacaacagaguugugg

SEQ ID NO: 1192 - RNA, 19 nt, Artificial Sequence
  Description of Artificial Sequence:  Target Sequence/siNA sense region
guuucaagugauauucuug

SEQ ID NO: 1193 - RNA, 19 nt, Artificial Sequence
  Description of Artificial Sequence:  Target Sequence/siNA sense region
guuaacaacuaaacgaaca

SEQ ID NO: 1194 - RNA, 19 nt, Artificial Sequence
  Description of Artificial Sequence:  Target Sequence/siNA sense region
auguuuauuuucuuauuau

SEQ ID NO: 1195 - RNA, 19 nt, Artificial Sequence
  Description of Artificial Sequence:  Target Sequence/siNA sense region
uuucuuacucucacuagug

SEQ ID NO: 1196 - RNA, 19 nt, Artificial Sequence
  Description of Artificial Sequence:  Target Sequence/siNA sense region
gguagugaccuugaccggu

SEQ ID NO: 1197 - RNA, 19 nt, Artificial Sequence
  Description of Artificial Sequence:  Target Sequence/siNA sense region
ugcaccacuuuugaugaug

SEQ ID NO: 1198 - RNA, 19 nt, Artificial Sequence
  Description of Artificial Sequence:  Target Sequence/siNA sense region
guucaagcuccuaauuaca

SEQ ID NO: 1199 - RNA, 19 nt, Artificial Sequence
  Description of Artificial Sequence:  Target Sequence/siNA sense region
acucaacauacuucaucua

SEQ ID NO: 1200 - RNA, 19 nt, Artificial Sequence
  Description of Artificial Sequence:  Target Sequence/siNA sense region
augagggggguuuacuauc

SEQ ID NO: 1201 - RNA, 19 nt, Artificial Sequence
  Description of Artificial Sequence:  Target Sequence/siNA sense region
ccugaugaaauuuuuagau

SEQ ID NO: 1202 - RNA, 19 nt, Artificial Sequence
  Description of Artificial Sequence:  Target Sequence/siNA sense region
ucagacacucuuuauuuaa

SEQ ID NO: 1203 - RNA, 19 nt, Artificial Sequence
  Description of Artificial Sequence:  Target Sequence/siNA sense region
acucaggauuuauuucuuc

SEQ ID NO: 1204 - RNA, 19 nt, Artificial Sequence
  Description of Artificial Sequence:  Target Sequence/siNA sense region
ccauuuuauucuaauguua

SEQ ID NO: 1205 - RNA, 19 nt, Artificial Sequence
  Description of Artificial Sequence:  Target Sequence/siNA sense region
acaggguuucauacuauua

SEQ ID NO: 1206 - RNA, 19 nt, Artificial Sequence
  Description of Artificial Sequence:  Target Sequence/siNA sense region
aaucauacguuuggcaacc

SEQ ID NO: 1207 - RNA, 19 nt, Artificial Sequence
  Description of Artificial Sequence:  Target Sequence/siNA sense region
ccugucauaccuuuuaagg

SEQ ID NO: 1208 - RNA, 19 nt, Artificial Sequence
  Description of Artificial Sequence:  Target Sequence/siNA sense region
gaugguauuuauuuugcug

SEQ ID NO: 1209 - RNA, 19 nt, Artificial Sequence
  Description of Artificial Sequence:  Target Sequence/siNA sense region
gccacagagaaaucaaaug

SEQ ID NO: 1210 - RNA, 19 nt, Artificial Sequence
  Description of Artificial Sequence:  Target Sequence/siNA sense region
guuguccgugguuggguuu

SEQ ID NO: 1211 - RNA, 19 nt, Artificial Sequence
  Description of Artificial Sequence:  Target Sequence/siNA sense region
uuugguucuaccaugaaca

SEQ ID NO: 1212 - RNA, 19 nt, Artificial Sequence
  Description of Artificial Sequence:  Target Sequence/siNA sense region
aacaagucacagucgguga

SEQ ID NO: 1213 - RNA, 19 nt, Artificial Sequence
  Description of Artificial Sequence:  Target Sequence/siNA sense region
auuauuauuaacaauucua

SEQ ID NO: 1214 - RNA, 19 nt, Artificial Sequence
  Description of Artificial Sequence:  Target Sequence/siNA sense region
acuaauguuguuauacgag

SEQ ID NO: 1215 - RNA, 19 nt, Artificial Sequence
  Description of Artificial Sequence:  Target Sequence/siNA sense region
gcauguaacuuugaauugu

SEQ ID NO: 1216 - RNA, 19 nt, Artificial Sequence
  Description of Artificial Sequence:  Target Sequence/siNA sense region
ugugacaacccuuucuuug

SEQ ID NO: 1217 - RNA, 19 nt, Artificial Sequence
  Description of Artificial Sequence:  Target Sequence/siNA sense region
gcuguuucuaaacccaugg

SEQ ID NO: 1218 - RNA, 19 nt, Artificial Sequence
  Description of Artificial Sequence:  Target Sequence/siNA sense region
gguacacagacacauacua

SEQ ID NO: 1219 - RNA, 19 nt, Artificial Sequence
  Description of Artificial Sequence:  Target Sequence/siNA sense region
augauauucgauaaugcau

SEQ ID NO: 1220 - RNA, 19 nt, Artificial Sequence
  Description of Artificial Sequence:  Target Sequence/siNA sense region
uuuaauugcacuuucgagu

SEQ ID NO: 1221 - RNA, 19 nt, Artificial Sequence
  Description of Artificial Sequence:  Target Sequence/siNA sense region
uacauaucugaugccuuuu

SEQ ID NO: 1222 - RNA, 19 nt, Artificial Sequence
  Description of Artificial Sequence:  Target Sequence/siNA sense region
ucgcuugauguuucagaaa

SEQ ID NO: 1223 - RNA, 19 nt, Artificial Sequence
  Description of Artificial Sequence:  Target Sequence/siNA sense region
aagucagguaauuuuaaac

SEQ ID NO: 1224 - RNA, 19 nt, Artificial Sequence
  Description of Artificial Sequence:  Target Sequence/siNA sense region
cacuuacgagaguuugugu

SEQ ID NO: 1225 - RNA, 19 nt, Artificial Sequence
  Description of Artificial Sequence:  Target Sequence/siNA sense region
uuuaaaaauaaagaugggu

SEQ ID NO: 1226 - RNA, 19 nt, Artificial Sequence
  Description of Artificial Sequence:  Target Sequence/siNA sense region
uuucucuauguuuauaagg

SEQ ID NO: 1227 - RNA, 19 nt, Artificial Sequence
  Description of Artificial Sequence:  Target Sequence/siNA sense region
ggcuaucaaccuauagaug

SEQ ID NO: 1228 - RNA, 19 nt, Artificial Sequence
  Description of Artificial Sequence:  Target Sequence/siNA sense region
guaguucgugaucuaccuu

SEQ ID NO: 1229 - RNA, 19 nt, Artificial Sequence
  Description of Artificial Sequence:  Target Sequence/siNA sense region
ucugguuuuaacacuuuga

SEQ ID NO: 1230 - RNA, 19 nt, Artificial Sequence
  Description of Artificial Sequence:  Target Sequence/siNA sense region
aaaccuauuuuuaaguugc

SEQ ID NO: 1231 - RNA, 19 nt, Artificial Sequence
  Description of Artificial Sequence:  Target Sequence/siNA sense region
ccucuugguauuaacauua

SEQ ID NO: 1232 - RNA, 19 nt, Artificial Sequence
  Description of Artificial Sequence:  Target Sequence/siNA sense region
acaaauuuuagagccauuc

SEQ ID NO: 1233 - RNA, 19 nt, Artificial Sequence
  Description of Artificial Sequence:  Target Sequence/siNA sense region
cuuacagccuuuucaccug

SEQ ID NO: 1234 - RNA, 19 nt, Artificial Sequence
  Description of Artificial Sequence:  Target Sequence/siNA sense region
gcucaagacauuuggggca

SEQ ID NO: 1235 - RNA, 19 nt, Artificial Sequence
  Description of Artificial Sequence:  Target Sequence/siNA sense region
acgucagcugcagccuauu

SEQ ID NO: 1236 - RNA, 19 nt, Artificial Sequence
  Description of Artificial Sequence:  Target Sequence/siNA sense region
uuuguuggcuauuuaaagc

SEQ ID NO: 1237 - RNA, 19 nt, Artificial Sequence
  Description of Artificial Sequence:  Target Sequence/siNA sense region
ccaacuacauuuaugcuca

SEQ ID NO: 1238 - RNA, 19 nt, Artificial Sequence
  Description of Artificial Sequence:  Target Sequence/siNA sense region
aaguaugaugaaaauggua

SEQ ID NO: 1239 - RNA, 19 nt, Artificial Sequence
  Description of Artificial Sequence:  Target Sequence/siNA sense region
acaaucacagaugcuguug

SEQ ID NO: 1240 - RNA, 19 nt, Artificial Sequence
  Description of Artificial Sequence:  Target Sequence/siNA sense region
gauuguucucaaaauccac

SEQ ID NO: 1241 - RNA, 19 nt, Artificial Sequence
  Description of Artificial Sequence:  Target Sequence/siNA sense region
cuugcugaacucaaaugcu

SEQ ID NO: 1242 - RNA, 19 nt, Artificial Sequence
  Description of Artificial Sequence:  Target Sequence/siNA sense region
ucuguuaagagcuuugaga

SEQ ID NO: 1243 - RNA, 19 nt, Artificial Sequence
  Description of Artificial Sequence:  Target Sequence/siNA sense region
auugacaaaggaauuuacc

SEQ ID NO: 1244 - RNA, 19 nt, Artificial Sequence
  Description of Artificial Sequence:  Target Sequence/siNA sense region
cagaccucuaauuucaggg

SEQ ID NO: 1245 - RNA, 19 nt, Artificial Sequence
  Description of Artificial Sequence:  Target Sequence/siNA sense region
guuguucccucaggagaug

SEQ ID NO: 1246 - RNA, 19 nt, Artificial Sequence
  Description of Artificial Sequence:  Target Sequence/siNA sense region
guugugagauucccuaaua

SEQ ID NO: 1247 - RNA, 19 nt, Artificial Sequence
  Description of Artificial Sequence:  Target Sequence/siNA sense region
auuacaaacuuguguccuu

SEQ ID NO: 1248 - RNA, 19 nt, Artificial Sequence
  Description of Artificial Sequence:  Target Sequence/siNA sense region
uuuggagagguuuuuaaug

SEQ ID NO: 1249 - RNA, 19 nt, Artificial Sequence
  Description of Artificial Sequence:  Target Sequence/siNA sense region
gcuacuaaauucccuucug

SEQ ID NO: 1250 - RNA, 19 nt, Artificial Sequence
  Description of Artificial Sequence:  Target Sequence/siNA sense region
gucuaugcaugggagagaa

SEQ ID NO: 1251 - RNA, 19 nt, Artificial Sequence
  Description of Artificial Sequence:  Target Sequence/siNA sense region
aaaaaaauuucuaauugug

SEQ ID NO: 1252 - RNA, 19 nt, Artificial Sequence
  Description of Artificial Sequence:  Target Sequence/siNA sense region
guugcugauuacucugugc

SEQ ID NO: 1253 - RNA, 19 nt, Artificial Sequence
  Description of Artificial Sequence:  Target Sequence/siNA sense region
cucuacaacucaacauuuu

SEQ ID NO: 1254 - RNA, 19 nt, Artificial Sequence
  Description of Artificial Sequence:  Target Sequence/siNA sense region
uuuucaaccuuuaagugcu

SEQ ID NO: 1255 - RNA, 19 nt, Artificial Sequence
  Description of Artificial Sequence:  Target Sequence/siNA sense region
uauggcguuucugccacua

SEQ ID NO: 1256 - RNA, 19 nt, Artificial Sequence
  Description of Artificial Sequence:  Target Sequence/siNA sense region
aaguugaaugaucuuugcu

SEQ ID NO: 1257 - RNA, 19 nt, Artificial Sequence
  Description of Artificial Sequence:  Target Sequence/siNA sense region
uucuccaaugucuaugcag

SEQ ID NO: 1258 - RNA, 19 nt, Artificial Sequence
  Description of Artificial Sequence:  Target Sequence/siNA sense region
gauucuuuuguagucaagg

SEQ ID NO: 1259 - RNA, 19 nt, Artificial Sequence
  Description of Artificial Sequence:  Target Sequence/siNA sense region
ggagaugauguaagacaaa

SEQ ID NO: 1260 - RNA, 19 nt, Artificial Sequence
  Description of Artificial Sequence:  Target Sequence/siNA sense region
auagcgccaggacaaacug

SEQ ID NO: 1261 - RNA, 19 nt, Artificial Sequence
  Description of Artificial Sequence:  Target Sequence/siNA sense region
gguguuauugcugauuaua

SEQ ID NO: 1262 - RNA, 19 nt, Artificial Sequence
  Description of Artificial Sequence:  Target Sequence/siNA sense region
aauuauaaauugccagaug

SEQ ID NO: 1263 - RNA, 19 nt, Artificial Sequence
  Description of Artificial Sequence:  Target Sequence/siNA sense region
gauuucauggguugugucc

SEQ ID NO: 1264 - RNA, 19 nt, Artificial Sequence
  Description of Artificial Sequence:  Target Sequence/siNA sense region
cuugcuuggaauacuagga

SEQ ID NO: 1265 - RNA, 19 nt, Artificial Sequence
  Description of Artificial Sequence:  Target Sequence/siNA sense region
aacauugaugcuacuucaa

SEQ ID NO: 1266 - RNA, 19 nt, Artificial Sequence
  Description of Artificial Sequence:  Target Sequence/siNA sense region
acugguaauuauaauuaua

SEQ ID NO: 1267 - RNA, 19 nt, Artificial Sequence
  Description of Artificial Sequence:  Target Sequence/siNA sense region
aaauauagguaucuuagac

SEQ ID NO: 1268 - RNA, 19 nt, Artificial Sequence
  Description of Artificial Sequence:  Target Sequence/siNA sense region
cauggcaagcuuaggcccu

SEQ ID NO: 1269 - RNA, 19 nt, Artificial Sequence
  Description of Artificial Sequence:  Target Sequence/siNA sense region
uuugagagagacauaucua

SEQ ID NO: 1270 - RNA, 19 nt, Artificial Sequence
  Description of Artificial Sequence:  Target Sequence/siNA sense region
aaugugccuuucuccccug

SEQ ID NO: 1271 - RNA, 19 nt, Artificial Sequence
  Description of Artificial Sequence:  Target Sequence/siNA sense region
gauggcaaaccuugcaccc

SEQ ID NO: 1272 - RNA, 19 nt, Artificial Sequence
  Description of Artificial Sequence:  Target Sequence/siNA sense region
ccaccugcucuuaauuguu

SEQ ID NO: 1273 - RNA, 19 nt, Artificial Sequence
  Description of Artificial Sequence:  Target Sequence/siNA sense region
uauuggccauuaaaugauu

SEQ ID NO: 1274 - RNA, 19 nt, Artificial Sequence
  Description of Artificial Sequence:  Target Sequence/siNA sense region
uaugguuuuuacaccacua

SEQ ID NO: 1275 - RNA, 19 nt, Artificial Sequence
  Description of Artificial Sequence:  Target Sequence/siNA sense region
acuggcauuggcuaccaac

SEQ ID NO: 1276 - RNA, 19 nt, Artificial Sequence
  Description of Artificial Sequence:  Target Sequence/siNA sense region
ccuuacagaguuguaguac

SEQ ID NO: 1277 - RNA, 19 nt, Artificial Sequence
  Description of Artificial Sequence:  Target Sequence/siNA sense region
cuuucuuuugaacuuuuaa

SEQ ID NO: 1278 - RNA, 19 nt, Artificial Sequence
  Description of Artificial Sequence:  Target Sequence/siNA sense region
aaugcaccggccacgguuu

SEQ ID NO: 1279 - RNA, 19 nt, Artificial Sequence
  Description of Artificial Sequence:  Target Sequence/siNA sense region
uguggaccaaaauuaucca

SEQ ID NO: 1280 - RNA, 19 nt, Artificial Sequence
  Description of Artificial Sequence:  Target Sequence/siNA sense region
acugaccuuauuaagaacc

SEQ ID NO: 1281 - RNA, 19 nt, Artificial Sequence
  Description of Artificial Sequence:  Target Sequence/siNA sense region
cagugugucaauuuuaauu

SEQ ID NO: 1282 - RNA, 19 nt, Artificial Sequence
  Description of Artificial Sequence:  Target Sequence/siNA sense region
uuuaauggacucacuggua

SEQ ID NO: 1283 - RNA, 19 nt, Artificial Sequence
  Description of Artificial Sequence:  Target Sequence/siNA sense region
acugguguguuaacuccuu

SEQ ID NO: 1284 - RNA, 19 nt, Artificial Sequence
  Description of Artificial Sequence:  Target Sequence/siNA sense region
ucuucaaagagauuucaac

SEQ ID NO: 1285 - RNA, 19 nt, Artificial Sequence
  Description of Artificial Sequence:  Target Sequence/siNA sense region
ccauuucaacaauuuggcc

SEQ ID NO: 1286 - RNA, 19 nt, Artificial Sequence
  Description of Artificial Sequence:  Target Sequence/siNA sense region
cgugauguuucugauuuca

SEQ ID NO: 1287 - RNA, 19 nt, Artificial Sequence
  Description of Artificial Sequence:  Target Sequence/siNA sense region
acugauuccguucgagauc

SEQ ID NO: 1288 - RNA, 19 nt, Artificial Sequence
  Description of Artificial Sequence:  Target Sequence/siNA sense region
ccuaaaacaucugaaauau

SEQ ID NO: 1289 - RNA, 19 nt, Artificial Sequence
  Description of Artificial Sequence:  Target Sequence/siNA sense region
uuagacauuucaccuugcg

SEQ ID NO: 1290 - RNA, 19 nt, Artificial Sequence
  Description of Artificial Sequence:  Target Sequence/siNA sense region
gcuuuuggggguguaagug

SEQ ID NO: 1291 - RNA, 19 nt, Artificial Sequence
  Description of Artificial Sequence:  Target Sequence/siNA sense region
guaauuacaccuggaacaa

SEQ ID NO: 1292 - RNA, 19 nt, Artificial Sequence
  Description of Artificial Sequence:  Target Sequence/siNA sense region
aaugcuucaucugaaguug

SEQ ID NO: 1293 - RNA, 19 nt, Artificial Sequence
  Description of Artificial Sequence:  Target Sequence/siNA sense region
gcuguucuauaucaagaug

SEQ ID NO: 1294 - RNA, 19 nt, Artificial Sequence
  Description of Artificial Sequence:  Target Sequence/siNA sense region
guuaacugcacugauguuu

SEQ ID NO: 1295 - RNA, 19 nt, Artificial Sequence
  Description of Artificial Sequence:  Target Sequence/siNA sense region
ucuacagcaauucaugcag

SEQ ID NO: 1296 - RNA, 19 nt, Artificial Sequence
  Description of Artificial Sequence:  Target Sequence/siNA sense region
gaucaacucacaccagcuu

SEQ ID NO: 1297 - RNA, 19 nt, Artificial Sequence
  Description of Artificial Sequence:  Target Sequence/siNA sense region
uggcgcauauauucuacug

SEQ ID NO: 1298 - RNA, 19 nt, Artificial Sequence
  Description of Artificial Sequence:  Target Sequence/siNA sense region
ggaaacaauguauuccaga

SEQ ID NO: 1299 - RNA, 19 nt, Artificial Sequence
  Description of Artificial Sequence:  Target Sequence/siNA sense region
acucaagcaggcugucuua

SEQ ID NO: 1300 - RNA, 19 nt, Artificial Sequence
  Description of Artificial Sequence:  Target Sequence/siNA sense region
auaggagcugagcaugucg

SEQ ID NO: 1301 - RNA, 19 nt, Artificial Sequence
  Description of Artificial Sequence:  Target Sequence/siNA sense region
gacacuucuuaugagugcg

SEQ ID NO: 1302 - RNA, 19 nt, Artificial Sequence
  Description of Artificial Sequence:  Target Sequence/siNA sense region
gacauuccuauuggagcug

SEQ ID NO: 1303 - RNA, 19 nt, Artificial Sequence
  Description of Artificial Sequence:  Target Sequence/siNA sense region
ggcauuugugcuaguuacc

SEQ ID NO: 1304 - RNA, 19 nt, Artificial Sequence
  Description of Artificial Sequence:  Target Sequence/siNA sense region
cauacaguuucuuuauuac

SEQ ID NO: 1305 - RNA, 19 nt, Artificial Sequence
  Description of Artificial Sequence:  Target Sequence/siNA sense region
cguaguacuagccaaaaau

SEQ ID NO: 1306 - RNA, 19 nt, Artificial Sequence
  Description of Artificial Sequence:  Target Sequence/siNA sense region
ucuauuguggcuuauacua

SEQ ID NO: 1307 - RNA, 19 nt, Artificial Sequence
  Description of Artificial Sequence:  Target Sequence/siNA sense region
augucuuuaggugcugaua

SEQ ID NO: 1308 - RNA, 19 nt, Artificial Sequence
  Description of Artificial Sequence:  Target Sequence/siNA sense region
aguucaauugcuuacucua

SEQ ID NO: 1309 - RNA, 19 nt, Artificial Sequence
  Description of Artificial Sequence:  Target Sequence/siNA sense region
aauaacaccauugcuauac

SEQ ID NO: 1310 - RNA, 19 nt, Artificial Sequence
  Description of Artificial Sequence:  Target Sequence/siNA sense region
ccuacuaacuuuucaauua

SEQ ID NO: 1311 - RNA, 19 nt, Artificial Sequence
  Description of Artificial Sequence:  Target Sequence/siNA sense region
agcauuacuacagaaguaa

SEQ ID NO: 1312 - RNA, 19 nt, Artificial Sequence
  Description of Artificial Sequence:  Target Sequence/siNA sense region
augccuguuucuauggcua

SEQ ID NO: 1313 - RNA, 19 nt, Artificial Sequence
  Description of Artificial Sequence:  Target Sequence/siNA sense region
aaaaccuccguagauugua

SEQ ID NO: 1314 - RNA, 19 nt, Artificial Sequence
  Description of Artificial Sequence:  Target Sequence/siNA sense region
aauauguacaucugcggag

SEQ ID NO: 1315 - RNA, 19 nt, Artificial Sequence
  Description of Artificial Sequence:  Target Sequence/siNA sense region
gauucuacugaaugugcua

SEQ ID NO: 1316 - RNA, 19 nt, Artificial Sequence
  Description of Artificial Sequence:  Target Sequence/siNA sense region
aauuugcuucuccaauaug

SEQ ID NO: 1317 - RNA, 19 nt, Artificial Sequence
  Description of Artificial Sequence:  Target Sequence/siNA sense region
gguagcuuuugcacacaac

SEQ ID NO: 1318 - RNA, 19 nt, Artificial Sequence
  Description of Artificial Sequence:  Target Sequence/siNA sense region
cuaaaucgugcacucucag

SEQ ID NO: 1319 - RNA, 19 nt, Artificial Sequence
  Description of Artificial Sequence:  Target Sequence/siNA sense region
gguauugcugcugaacagg

SEQ ID NO: 1320 - RNA, 19 nt, Artificial Sequence
  Description of Artificial Sequence:  Target Sequence/siNA sense region
gaucgcaacacacgugaag

SEQ ID NO: 1321 - RNA, 19 nt, Artificial Sequence
  Description of Artificial Sequence:  Target Sequence/siNA sense region
guguucgcucaagucaaac

SEQ ID NO: 1322 - RNA, 19 nt, Artificial Sequence
  Description of Artificial Sequence:  Target Sequence/siNA sense region
caaauguacaaaaccccaa

SEQ ID NO: 1323 - RNA, 19 nt, Artificial Sequence
  Description of Artificial Sequence:  Target Sequence/siNA sense region
acuuugaaauauuuuggug

SEQ ID NO: 1324 - RNA, 19 nt, Artificial Sequence
  Description of Artificial Sequence:  Target Sequence/siNA sense region
gguuuuaauuuuucacaaa

SEQ ID NO: 1325 - RNA, 19 nt, Artificial Sequence
  Description of Artificial Sequence:  Target Sequence/siNA sense region
auauuaccugacccucuaa

SEQ ID NO: 1326 - RNA, 19 nt, Artificial Sequence
  Description of Artificial Sequence:  Target Sequence/siNA sense region
aagccaacuaagaggucuu

SEQ ID NO: 1327 - RNA, 19 nt, Artificial Sequence
  Description of Artificial Sequence:  Target Sequence/siNA sense region
uuuauugaggacuugcucu

SEQ ID NO: 1328 - RNA, 19 nt, Artificial Sequence
  Description of Artificial Sequence:  Target Sequence/siNA sense region
uuuaauaaggugacacucg

SEQ ID NO: 1329 - RNA, 19 nt, Artificial Sequence
  Description of Artificial Sequence:  Target Sequence/siNA sense region
gcugaugcuggcuucauga

SEQ ID NO: 1330 - RNA, 19 nt, Artificial Sequence
  Description of Artificial Sequence:  Target Sequence/siNA sense region
aagcaauauggcgaaugcc

SEQ ID NO: 1331 - RNA, 19 nt, Artificial Sequence
  Description of Artificial Sequence:  Target Sequence/siNA sense region
cuaggugauauuaaugcua

SEQ ID NO: 1332 - RNA, 19 nt, Artificial Sequence
  Description of Artificial Sequence:  Target Sequence/siNA sense region
agagaucucauuugugcgc

SEQ ID NO: 1333 - RNA, 19 nt, Artificial Sequence
  Description of Artificial Sequence:  Target Sequence/siNA sense region
cagaaguucaauggacuua

SEQ ID NO: 1334 - RNA, 19 nt, Artificial Sequence
  Description of Artificial Sequence:  Target Sequence/siNA sense region
acaguguugccaccucugc

SEQ ID NO: 1335 - RNA, 19 nt, Artificial Sequence
  Description of Artificial Sequence:  Target Sequence/siNA sense region
cucacugaugauaugauug

SEQ ID NO: 1336 - RNA, 19 nt, Artificial Sequence
  Description of Artificial Sequence:  Target Sequence/siNA sense region
gcugccuacacugcugcuc

SEQ ID NO: 1337 - RNA, 19 nt, Artificial Sequence
  Description of Artificial Sequence:  Target Sequence/siNA sense region
cuaguuagugguacugcca

SEQ ID NO: 1338 - RNA, 19 nt, Artificial Sequence
  Description of Artificial Sequence:  Target Sequence/siNA sense region
acugcuggauggacauuug

SEQ ID NO: 1339 - RNA, 19 nt, Artificial Sequence
  Description of Artificial Sequence:  Target Sequence/siNA sense region
ggugcuggcgcugcucuuc

SEQ ID NO: 1340 - RNA, 19 nt, Artificial Sequence
  Description of Artificial Sequence:  Target Sequence/siNA sense region
caaauaccuuuugcuaugc

SEQ ID NO: 1341 - RNA, 19 nt, Artificial Sequence
  Description of Artificial Sequence:  Target Sequence/siNA sense region
caaauggcauauagguuca

SEQ ID NO: 1342 - RNA, 19 nt, Artificial Sequence
  Description of Artificial Sequence:  Target Sequence/siNA sense region
aauggcauuggaguuaccc

SEQ ID NO: 1343 - RNA, 19 nt, Artificial Sequence
  Description of Artificial Sequence:  Target Sequence/siNA sense region
caaaauguucucuaugaga

SEQ ID NO: 1344 - RNA, 19 nt, Artificial Sequence
  Description of Artificial Sequence:  Target Sequence/siNA sense region
aaccaaaaacaaaucgcca

SEQ ID NO: 1345 - RNA, 19 nt, Artificial Sequence
  Description of Artificial Sequence:  Target Sequence/siNA sense region
aaccaauuuaacaaggcga

SEQ ID NO: 1346 - RNA, 19 nt, Artificial Sequence
  Description of Artificial Sequence:  Target Sequence/siNA sense region
auuagucaaauucaagaau

SEQ ID NO: 1347 - RNA, 19 nt, Artificial Sequence
  Description of Artificial Sequence:  Target Sequence/siNA sense region
ucacuuacaacaacaucaa

SEQ ID NO: 1348 - RNA, 19 nt, Artificial Sequence
  Description of Artificial Sequence:  Target Sequence/siNA sense region
acugcauugggcaagcugc

SEQ ID NO: 1349 - RNA, 19 nt, Artificial Sequence
  Description of Artificial Sequence:  Target Sequence/siNA sense region
caagacguuguuaaccaga

SEQ ID NO: 1350 - RNA, 19 nt, Artificial Sequence
  Description of Artificial Sequence:  Target Sequence/siNA sense region
aaugcucaagcauuaaaca

SEQ ID NO: 1351 - RNA, 19 nt, Artificial Sequence
  Description of Artificial Sequence:  Target Sequence/siNA sense region
acacuuguuaaacaacuua

SEQ ID NO: 1352 - RNA, 19 nt, Artificial Sequence
  Description of Artificial Sequence:  Target Sequence/siNA sense region
agcucuaauuuuggugcaa

SEQ ID NO: 1353 - RNA, 19 nt, Artificial Sequence
  Description of Artificial Sequence:  Target Sequence/siNA sense region
auuucaagugugcuaaaug

SEQ ID NO: 1354 - RNA, 19 nt, Artificial Sequence
  Description of Artificial Sequence:  Target Sequence/siNA sense region
gauauccuuucgcgacuug

SEQ ID NO: 1355 - RNA, 19 nt, Artificial Sequence
  Description of Artificial Sequence:  Target Sequence/siNA sense region
gauaaagucgaggcggagg

SEQ ID NO: 1356 - RNA, 19 nt, Artificial Sequence
  Description of Artificial Sequence:  Target Sequence/siNA sense region
guacaaauugacagguuaa

SEQ ID NO: 1357 - RNA, 19 nt, Artificial Sequence
  Description of Artificial Sequence:  Target Sequence/siNA sense region
auuacaggcagacuucaaa

SEQ ID NO: 1358 - RNA, 19 nt, Artificial Sequence
  Description of Artificial Sequence:  Target Sequence/siNA sense region
agccuucaaaccuauguaa

SEQ ID NO: 1359 - RNA, 19 nt, Artificial Sequence
  Description of Artificial Sequence:  Target Sequence/siNA sense region
acacaacaacuaaucaggg

SEQ ID NO: 1360 - RNA, 19 nt, Artificial Sequence
  Description of Artificial Sequence:  Target Sequence/siNA sense region
gcugcugaaaucagggcuu

SEQ ID NO: 1361 - RNA, 19 nt, Artificial Sequence
  Description of Artificial Sequence:  Target Sequence/siNA sense region
ucugcuaaucuugcugcua

SEQ ID NO: 1362 - RNA, 19 nt, Artificial Sequence
  Description of Artificial Sequence:  Target Sequence/siNA sense region
acuaaaaugucugagugug

SEQ ID NO: 1363 - RNA, 19 nt, Artificial Sequence
  Description of Artificial Sequence:  Target Sequence/siNA sense region
guucuuggacaaucaaaaa

SEQ ID NO: 1364 - RNA, 19 nt, Artificial Sequence
  Description of Artificial Sequence:  Target Sequence/siNA sense region
agaguugacuuuuguggaa

SEQ ID NO: 1365 - RNA, 19 nt, Artificial Sequence
  Description of Artificial Sequence:  Target Sequence/siNA sense region
aagggcuaccaccuuaugu

SEQ ID NO: 1366 - RNA, 19 nt, Artificial Sequence
  Description of Artificial Sequence:  Target Sequence/siNA sense region
uccuucccacaagcagccc

SEQ ID NO: 1367 - RNA, 19 nt, Artificial Sequence
  Description of Artificial Sequence:  Target Sequence/siNA sense region
ccgcaugguguugucuucc

SEQ ID NO: 1368 - RNA, 19 nt, Artificial Sequence
  Description of Artificial Sequence:  Target Sequence/siNA sense region
cuacaugucacguaugugc

SEQ ID NO: 1369 - RNA, 19 nt, Artificial Sequence
  Description of Artificial Sequence:  Target Sequence/siNA sense region
ccaucccaggagaggaacu

SEQ ID NO: 1370 - RNA, 19 nt, Artificial Sequence
  Description of Artificial Sequence:  Target Sequence/siNA sense region
uucaccacagcgccagcaa

SEQ ID NO: 1371 - RNA, 19 nt, Artificial Sequence
  Description of Artificial Sequence:  Target Sequence/siNA sense region
auuugucaugaaggcaaag

SEQ ID NO: 1372 - RNA, 19 nt, Artificial Sequence
  Description of Artificial Sequence:  Target Sequence/siNA sense region
gcauacuucccucgugaag

SEQ ID NO: 1373 - RNA, 19 nt, Artificial Sequence
  Description of Artificial Sequence:  Target Sequence/siNA sense region
gguguuuuuguguuuaaug

SEQ ID NO: 1374 - RNA, 19 nt, Artificial Sequence
  Description of Artificial Sequence:  Target Sequence/siNA sense region
ggcacuucuugguuuauua

SEQ ID NO: 1375 - RNA, 19 nt, Artificial Sequence
  Description of Artificial Sequence:  Target Sequence/siNA sense region
acacagaggaacuucuuuu

SEQ ID NO: 1376 - RNA, 19 nt, Artificial Sequence
  Description of Artificial Sequence:  Target Sequence/siNA sense region
ucuccacaaauaauuacua

SEQ ID NO: 1377 - RNA, 19 nt, Artificial Sequence
  Description of Artificial Sequence:  Target Sequence/siNA sense region
acagacaauacauuugucu

SEQ ID NO: 1378 - RNA, 19 nt, Artificial Sequence
  Description of Artificial Sequence:  Target Sequence/siNA sense region
ucaggaaauugugaugucg

SEQ ID NO: 1379 - RNA, 19 nt, Artificial Sequence
  Description of Artificial Sequence:  Target Sequence/siNA sense region
guuauuggcaucauuaaca

SEQ ID NO: 1380 - RNA, 19 nt, Artificial Sequence
  Description of Artificial Sequence:  Target Sequence/siNA sense region
aacacaguuuaugauccuc

SEQ ID NO: 1381 - RNA, 19 nt, Artificial Sequence
  Description of Artificial Sequence:  Target Sequence/siNA sense region
cugcaaccugagcuugacu

SEQ ID NO: 1382 - RNA, 19 nt, Artificial Sequence
  Description of Artificial Sequence:  Target Sequence/siNA sense region
ucauucaaagaagagcugg

SEQ ID NO: 1383 - RNA, 19 nt, Artificial Sequence
  Description of Artificial Sequence:  Target Sequence/siNA sense region
gacaaguacuucaaaaauc

SEQ ID NO: 1384 - RNA, 19 nt, Artificial Sequence
  Description of Artificial Sequence:  Target Sequence/siNA sense region
cauacaucaccagauguug

SEQ ID NO: 1385 - RNA, 19 nt, Artificial Sequence
  Description of Artificial Sequence:  Target Sequence/siNA sense region
gaucuuggcgacauuucag

SEQ ID NO: 1386 - RNA, 19 nt, Artificial Sequence
  Description of Artificial Sequence:  Target Sequence/siNA sense region
ggcauuaacgcuucugucg

SEQ ID NO: 1387 - RNA, 19 nt, Artificial Sequence
  Description of Artificial Sequence:  Target Sequence/siNA sense region
gucaacauucaaaaagaaa

SEQ ID NO: 1388 - RNA, 19 nt, Artificial Sequence
  Description of Artificial Sequence:  Target Sequence/siNA sense region
auugaccgccucaaugagg

SEQ ID NO: 1389 - RNA, 19 nt, Artificial Sequence
  Description of Artificial Sequence:  Target Sequence/siNA sense region
gucgcuaaaaauuuaaaug

SEQ ID NO: 1390 - RNA, 19 nt, Artificial Sequence
  Description of Artificial Sequence:  Target Sequence/siNA sense region
gaaucacucauugaccuuc

SEQ ID NO: 1391 - RNA, 19 nt, Artificial Sequence
  Description of Artificial Sequence:  Target Sequence/siNA sense region
caagaauugggaaaauaug

SEQ ID NO: 1392 - RNA, 19 nt, Artificial Sequence
  Description of Artificial Sequence:  Target Sequence/siNA sense region
gagcaauauauuaaauggc

SEQ ID NO: 1393 - RNA, 19 nt, Artificial Sequence
  Description of Artificial Sequence:  Target Sequence/siNA sense region
ccuugguauguuuggcucg

SEQ ID NO: 1394 - RNA, 19 nt, Artificial Sequence
  Description of Artificial Sequence:  Target Sequence/siNA sense region
ggcuucauugcuggacuaa

SEQ ID NO: 1395 - RNA, 19 nt, Artificial Sequence
  Description of Artificial Sequence:  Target Sequence/siNA sense region
auugccaucgucaugguua

SEQ ID NO: 1396 - RNA, 19 nt, Artificial Sequence
  Description of Artificial Sequence:  Target Sequence/siNA sense region
acaaucuugcuuuguugca

SEQ ID NO: 1397 - RNA, 19 nt, Artificial Sequence
  Description of Artificial Sequence:  Target Sequence/siNA sense region
augacuaguuguugcaguu

SEQ ID NO: 1398 - RNA, 19 nt, Artificial Sequence
  Description of Artificial Sequence:  Target Sequence/siNA sense region
ugccucaagggugcaugcu

SEQ ID NO: 1399 - RNA, 19 nt, Artificial Sequence
  Description of Artificial Sequence:  Target Sequence/siNA sense region
ucuugugguucuugcugca

SEQ ID NO: 1400 - RNA, 19 nt, Artificial Sequence
  Description of Artificial Sequence:  Target Sequence/siNA sense region
aaguuugaugaggaugacu

SEQ ID NO: 1401 - RNA, 19 nt, Artificial Sequence
  Description of Artificial Sequence:  Target Sequence/siNA sense region
ucugagccaguucucaagg

SEQ ID NO: 1402 - RNA, 19 nt, Artificial Sequence
  Description of Artificial Sequence:  Target Sequence/siNA sense region
ggugucaaauuacauuaca

SEQ ID NO: 1403 - RNA, 19 nt, Artificial Sequence
  Description of Artificial Sequence:  Target Sequence/siNA sense region
acauaaacgaacuuaugga

SEQ ID NO: 1404 - RNA, 19 nt, Artificial Sequence
  Description of Artificial Sequence:  Target Sequence/siNA sense region
auuuguuuaugagauuuuu

SEQ ID NO: 1405 - RNA, 19 nt, Artificial Sequence
  Description of Artificial Sequence:  Target Sequence/siNA sense region
uuacucuuggaucaauuac

SEQ ID NO: 1406 - RNA, 19 nt, Artificial Sequence
  Description of Artificial Sequence:  Target Sequence/siNA sense region
cugcacagccaguaaaaau

SEQ ID NO: 1407 - RNA, 19 nt, Artificial Sequence
  Description of Artificial Sequence:  Target Sequence/siNA sense region
uugacaaugcuucuccugc

SEQ ID NO: 1408 - RNA, 19 nt, Artificial Sequence
  Description of Artificial Sequence:  Target Sequence/siNA sense region
caaguacuguucaugcuac

SEQ ID NO: 1409 - RNA, 19 nt, Artificial Sequence
  Description of Artificial Sequence:  Target Sequence/siNA sense region
cagcaacgauaccgcuaca

SEQ ID NO: 1410 - RNA, 19 nt, Artificial Sequence
  Description of Artificial Sequence:  Target Sequence/siNA sense region
aagccucacucccuuucgg

SEQ ID NO: 1411 - RNA, 19 nt, Artificial Sequence
  Description of Artificial Sequence:  Target Sequence/siNA sense region
gauggcuuguuauuggcgu

SEQ ID NO: 1412 - RNA, 19 nt, Artificial Sequence
  Description of Artificial Sequence:  Target Sequence/siNA sense region
uugcauuucuugcuguuuu

SEQ ID NO: 1413 - RNA, 19 nt, Artificial Sequence
  Description of Artificial Sequence:  Target Sequence/siNA sense region
uucagagcgcuaccaaaau

SEQ ID NO: 1414 - RNA, 19 nt, Artificial Sequence
  Description of Artificial Sequence:  Target Sequence/siNA sense region
uaauugcgcucaauaaaag

SEQ ID NO: 1415 - RNA, 19 nt, Artificial Sequence
  Description of Artificial Sequence:  Target Sequence/siNA sense region
gauggcagcuagcccuuua

SEQ ID NO: 1416 - RNA, 19 nt, Artificial Sequence
  Description of Artificial Sequence:  Target Sequence/siNA sense region
auaagggcuuccaguucau

SEQ ID NO: 1417 - RNA, 19 nt, Artificial Sequence
  Description of Artificial Sequence:  Target Sequence/siNA sense region
uuugcaauuuacugcugcu

SEQ ID NO: 1418 - RNA, 19 nt, Artificial Sequence
  Description of Artificial Sequence:  Target Sequence/siNA sense region
uauuuguuaccaucuauuc

SEQ ID NO: 1419 - RNA, 19 nt, Artificial Sequence
  Description of Artificial Sequence:  Target Sequence/siNA sense region
cacaucuuuugcuugucgc

SEQ ID NO: 1420 - RNA, 19 nt, Artificial Sequence
  Description of Artificial Sequence:  Target Sequence/siNA sense region
cugcagguauggaggcgca

SEQ ID NO: 1421 - RNA, 19 nt, Artificial Sequence
  Description of Artificial Sequence:  Target Sequence/siNA sense region
aauuuuuguaccucuaugc

SEQ ID NO: 1422 - RNA, 19 nt, Artificial Sequence
  Description of Artificial Sequence:  Target Sequence/siNA sense region
ccuugauauauuuucuaca

SEQ ID NO: 1423 - RNA, 19 nt, Artificial Sequence
  Description of Artificial Sequence:  Target Sequence/siNA sense region
aaugcaucaacgcauguag

SEQ ID NO: 1424 - RNA, 19 nt, Artificial Sequence
  Description of Artificial Sequence:  Target Sequence/siNA sense region
gaauuauuaugagauguug

SEQ ID NO: 1425 - RNA, 19 nt, Artificial Sequence
  Description of Artificial Sequence:  Target Sequence/siNA sense region
ggcuuuguuggaagugcaa

SEQ ID NO: 1426 - RNA, 19 nt, Artificial Sequence
  Description of Artificial Sequence:  Target Sequence/siNA sense region
aauccaagaacccauuacu

SEQ ID NO: 1427 - RNA, 19 nt, Artificial Sequence
  Description of Artificial Sequence:  Target Sequence/siNA sense region
uuuaugaugccaacuacuu

SEQ ID NO: 1428 - RNA, 19 nt, Artificial Sequence
  Description of Artificial Sequence:  Target Sequence/siNA sense region
uuguuugcuggcacacaca

SEQ ID NO: 1429 - RNA, 19 nt, Artificial Sequence
  Description of Artificial Sequence:  Target Sequence/siNA sense region
auaacuaugacuacuguau

SEQ ID NO: 1430 - RNA, 19 nt, Artificial Sequence
  Description of Artificial Sequence:  Target Sequence/siNA sense region
uaccauauaacagugucac

SEQ ID NO: 1431 - RNA, 19 nt, Artificial Sequence
  Description of Artificial Sequence:  Target Sequence/siNA sense region
cagauacaauugucguuac

SEQ ID NO: 1432 - RNA, 19 nt, Artificial Sequence
  Description of Artificial Sequence:  Target Sequence/siNA sense region
cugaaggugacggcauuuc

SEQ ID NO: 1433 - RNA, 19 nt, Artificial Sequence
  Description of Artificial Sequence:  Target Sequence/siNA sense region
caacaccaaaacucaaaga

SEQ ID NO: 1434 - RNA, 19 nt, Artificial Sequence
  Description of Artificial Sequence:  Target Sequence/siNA sense region
aagacuaccaaauuggugg

SEQ ID NO: 1435 - RNA, 19 nt, Artificial Sequence
  Description of Artificial Sequence:  Target Sequence/siNA sense region
guuauucugaggauaggca

SEQ ID NO: 1436 - RNA, 19 nt, Artificial Sequence
  Description of Artificial Sequence:  Target Sequence/siNA sense region
acucagguguuaaagacua

SEQ ID NO: 1437 - RNA, 19 nt, Artificial Sequence
  Description of Artificial Sequence:  Target Sequence/siNA sense region
augucguuguacauggcua

SEQ ID NO: 1438 - RNA, 19 nt, Artificial Sequence
  Description of Artificial Sequence:  Target Sequence/siNA sense region
auuucaccgaaguuuacua

SEQ ID NO: 1439 - RNA, 19 nt, Artificial Sequence
  Description of Artificial Sequence:  Target Sequence/siNA sense region
accagcuugagucuacaca

SEQ ID NO: 1440 - RNA, 19 nt, Artificial Sequence
  Description of Artificial Sequence:  Target Sequence/siNA sense region
aaauuacuacagacacugg

SEQ ID NO: 1441 - RNA, 19 nt, Artificial Sequence
  Description of Artificial Sequence:  Target Sequence/siNA sense region
guauugaaaaugcuacauu

SEQ ID NO: 1442 - RNA, 19 nt, Artificial Sequence
  Description of Artificial Sequence:  Target Sequence/siNA sense region
ucuucaucuuuaacaagcu

SEQ ID NO: 1443 - RNA, 19 nt, Artificial Sequence
  Description of Artificial Sequence:  Target Sequence/siNA sense region
uuguuaaagacccaccgaa

SEQ ID NO: 1444 - RNA, 19 nt, Artificial Sequence
  Description of Artificial Sequence:  Target Sequence/siNA sense region
augugcaaauacacacaau

SEQ ID NO: 1445 - RNA, 19 nt, Artificial Sequence
  Description of Artificial Sequence:  Target Sequence/siNA sense region
ucgacggcucuucaggagu

SEQ ID NO: 1446 - RNA, 19 nt, Artificial Sequence
  Description of Artificial Sequence:  Target Sequence/siNA sense region
uugcuaauccagcaaugga

SEQ ID NO: 1447 - RNA, 19 nt, Artificial Sequence
  Description of Artificial Sequence:  Target Sequence/siNA sense region
auccaauuuaugaugagcc

SEQ ID NO: 1448 - RNA, 19 nt, Artificial Sequence
  Description of Artificial Sequence:  Target Sequence/siNA sense region
cgacgacgacuacuagcgu

SEQ ID NO: 1449 - RNA, 19 nt, Artificial Sequence
  Description of Artificial Sequence:  Target Sequence/siNA sense region
ugccuuuguaagcacaaga

SEQ ID NO: 1450 - RNA, 19 nt, Artificial Sequence
  Description of Artificial Sequence:  Target Sequence/siNA sense region
aaagugaguacgaacuuau

SEQ ID NO: 1451 - RNA, 19 nt, Artificial Sequence
  Description of Artificial Sequence:  Target Sequence/siNA sense region
uguacucauucguuucgga

SEQ ID NO: 1452 - RNA, 19 nt, Artificial Sequence
  Description of Artificial Sequence:  Target Sequence/siNA sense region
aagaaacagguacguuaau

SEQ ID NO: 1453 - RNA, 19 nt, Artificial Sequence
  Description of Artificial Sequence:  Target Sequence/siNA sense region
uaguuaauagcguacuucu

SEQ ID NO: 1454 - RNA, 19 nt, Artificial Sequence
  Description of Artificial Sequence:  Target Sequence/siNA sense region
uuuuucuugcuuucguggu

SEQ ID NO: 1455 - RNA, 19 nt, Artificial Sequence
  Description of Artificial Sequence:  Target Sequence/siNA sense region
uauucuugcuagucacacu

SEQ ID NO: 1456 - RNA, 19 nt, Artificial Sequence
  Description of Artificial Sequence:  Target Sequence/siNA sense region
uagccauccuuacugcgcu

SEQ ID NO: 1457 - RNA, 19 nt, Artificial Sequence
  Description of Artificial Sequence:  Target Sequence/siNA sense region
uucgauugugugcguacug

SEQ ID NO: 1458 - RNA, 19 nt, Artificial Sequence
  Description of Artificial Sequence:  Target Sequence/siNA sense region
gcugcaauauuguuaacgu

SEQ ID NO: 1459 - RNA, 19 nt, Artificial Sequence
  Description of Artificial Sequence:  Target Sequence/siNA sense region
ugaguuuaguaaaaccaac

SEQ ID NO: 1460 - RNA, 19 nt, Artificial Sequence
  Description of Artificial Sequence:  Target Sequence/siNA sense region
cgguuuacgucuacucgcg

SEQ ID NO: 1461 - RNA, 19 nt, Artificial Sequence
  Description of Artificial Sequence:  Target Sequence/siNA sense region
guguuaaaaaucugaacuc

SEQ ID NO: 1462 - RNA, 19 nt, Artificial Sequence
  Description of Artificial Sequence:  Target Sequence/siNA sense region
cuucugaaggaguuccuga

SEQ ID NO: 1463 - RNA, 19 nt, Artificial Sequence
  Description of Artificial Sequence:  Target Sequence/siNA sense region
aucuucuggucuaaacgaa

SEQ ID NO: 1464 - RNA, 19 nt, Artificial Sequence
  Description of Artificial Sequence:  Target Sequence/siNA sense region
acuaacuauuauuauuauu

SEQ ID NO: 1465 - RNA, 19 nt, Artificial Sequence
  Description of Artificial Sequence:  Target Sequence/siNA sense region
ucuguuuggaacuuuaaca

SEQ ID NO: 1466 - RNA, 19 nt, Artificial Sequence
  Description of Artificial Sequence:  Target Sequence/siNA sense region
auugcuuaucauggcagac

SEQ ID NO: 1467 - RNA, 19 nt, Artificial Sequence
  Description of Artificial Sequence:  Target Sequence/siNA sense region
caacgguacuauuaccguu

SEQ ID NO: 1468 - RNA, 19 nt, Artificial Sequence
  Description of Artificial Sequence:  Target Sequence/siNA sense region
ugaggagcuuaaacaacuc

SEQ ID NO: 1469 - RNA, 19 nt, Artificial Sequence
  Description of Artificial Sequence:  Target Sequence/siNA sense region
ccuggaacaauggaaccua

SEQ ID NO: 1470 - RNA, 19 nt, Artificial Sequence
  Description of Artificial Sequence:  Target Sequence/siNA sense region
aguaauagguuuccuauuc

SEQ ID NO: 1471 - RNA, 19 nt, Artificial Sequence
  Description of Artificial Sequence:  Target Sequence/siNA sense region
ccuagccuggauuauguua

SEQ ID NO: 1472 - RNA, 19 nt, Artificial Sequence
  Description of Artificial Sequence:  Target Sequence/siNA sense region
acuacaauuugccuauucu

SEQ ID NO: 1473 - RNA, 19 nt, Artificial Sequence
  Description of Artificial Sequence:  Target Sequence/siNA sense region
uaaucggaacagguuuuug

SEQ ID NO: 1474 - RNA, 19 nt, Artificial Sequence
  Description of Artificial Sequence:  Target Sequence/siNA sense region
guacauaauaaagcuuguu

SEQ ID NO: 1475 - RNA, 19 nt, Artificial Sequence
  Description of Artificial Sequence:  Target Sequence/siNA sense region
uuuccucuggcucuugugg

SEQ ID NO: 1476 - RNA, 19 nt, Artificial Sequence
  Description of Artificial Sequence:  Target Sequence/siNA sense region
gccaguaacacuugcuugu

SEQ ID NO: 1477 - RNA, 19 nt, Artificial Sequence
  Description of Artificial Sequence:  Target Sequence/siNA sense region
uuuugugcuugcugcuguc

SEQ ID NO: 1478 - RNA, 19 nt, Artificial Sequence
  Description of Artificial Sequence:  Target Sequence/siNA sense region
cuacagaauuaauugggug

SEQ ID NO: 1479 - RNA, 19 nt, Artificial Sequence
  Description of Artificial Sequence:  Target Sequence/siNA sense region
gacuggcgggauugcgauu

SEQ ID NO: 1480 - RNA, 19 nt, Artificial Sequence
  Description of Artificial Sequence:  Target Sequence/siNA sense region
ugcaauggcuuguauugua

SEQ ID NO: 1481 - RNA, 19 nt, Artificial Sequence
  Description of Artificial Sequence:  Target Sequence/siNA sense region
aggcuugauguggcuuagc

SEQ ID NO: 1482 - RNA, 19 nt, Artificial Sequence
  Description of Artificial Sequence:  Target Sequence/siNA sense region
cuacuucguugcuuccuuc

SEQ ID NO: 1483 - RNA, 19 nt, Artificial Sequence
  Description of Artificial Sequence:  Target Sequence/siNA sense region
caggcuguuugcucguacc

SEQ ID NO: 1484 - RNA, 19 nt, Artificial Sequence
  Description of Artificial Sequence:  Target Sequence/siNA sense region
ccgcucaauguggucauuc

SEQ ID NO: 1485 - RNA, 19 nt, Artificial Sequence
  Description of Artificial Sequence:  Target Sequence/siNA sense region
caacccagaaacaaacauu

SEQ ID NO: 1486 - RNA, 19 nt, Artificial Sequence
  Description of Artificial Sequence:  Target Sequence/siNA sense region
ucuucucaaugugccucuc

SEQ ID NO: 1487 - RNA, 19 nt, Artificial Sequence
  Description of Artificial Sequence:  Target Sequence/siNA sense region
ccgggggacaauugugacc

SEQ ID NO: 1488 - RNA, 19 nt, Artificial Sequence
  Description of Artificial Sequence:  Target Sequence/siNA sense region
cagaccgcucauggaaagu

SEQ ID NO: 1489 - RNA, 19 nt, Artificial Sequence
  Description of Artificial Sequence:  Target Sequence/siNA sense region
ugaacuugucauuggugcu

SEQ ID NO: 1490 - RNA, 19 nt, Artificial Sequence
  Description of Artificial Sequence:  Target Sequence/siNA sense region
ugugaucauucguggucac

SEQ ID NO: 1491 - RNA, 19 nt, Artificial Sequence
  Description of Artificial Sequence:  Target Sequence/siNA sense region
cuugcgaauggccggacac

SEQ ID NO: 1492 - RNA, 19 nt, Artificial Sequence
  Description of Artificial Sequence:  Target Sequence/siNA sense region
cucccuagggcgcugugac

SEQ ID NO: 1493 - RNA, 19 nt, Artificial Sequence
  Description of Artificial Sequence:  Target Sequence/siNA sense region
cauuaaggaccugccaaaa

SEQ ID NO: 1494 - RNA, 19 nt, Artificial Sequence
  Description of Artificial Sequence:  Target Sequence/siNA sense region
agagaucacuguggcuaca

SEQ ID NO: 1495 - RNA, 19 nt, Artificial Sequence
  Description of Artificial Sequence:  Target Sequence/siNA sense region
aucacgaacgcuuucuuau

SEQ ID NO: 1496 - RNA, 19 nt, Artificial Sequence
  Description of Artificial Sequence:  Target Sequence/siNA sense region
uuacaaauuaggagcgucg

SEQ ID NO: 1497 - RNA, 19 nt, Artificial Sequence
  Description of Artificial Sequence:  Target Sequence/siNA sense region
gcagcguguaggcacugau

SEQ ID NO: 1498 - RNA, 19 nt, Artificial Sequence
  Description of Artificial Sequence:  Target Sequence/siNA sense region
uucagguuuugcugcauac

SEQ ID NO: 1499 - RNA, 19 nt, Artificial Sequence
  Description of Artificial Sequence:  Target Sequence/siNA sense region
caaccgcuaccguauugga

SEQ ID NO: 1500 - RNA, 19 nt, Artificial Sequence
  Description of Artificial Sequence:  Target Sequence/siNA sense region
aaacuauaaauuaaauaca

SEQ ID NO: 1501 - RNA, 19 nt, Artificial Sequence
  Description of Artificial Sequence:  Target Sequence/siNA sense region
agaccacgccgguagcaac

SEQ ID NO: 1502 - RNA, 19 nt, Artificial Sequence
  Description of Artificial Sequence:  Target Sequence/siNA sense region
cgacaauauugcuuugcua

SEQ ID NO: 1503 - RNA, 19 nt, Artificial Sequence
  Description of Artificial Sequence:  Target Sequence/siNA sense region
aguacaguaagugacaaca

SEQ ID NO: 1504 - RNA, 19 nt, Artificial Sequence
  Description of Artificial Sequence:  Target Sequence/siNA sense region
agauguuucaucuuguuga

SEQ ID NO: 1505 - RNA, 19 nt, Artificial Sequence
  Description of Artificial Sequence:  Target Sequence/siNA sense region
acuuccagguuacaauagc

SEQ ID NO: 1506 - RNA, 19 nt, Artificial Sequence
  Description of Artificial Sequence:  Target Sequence/siNA sense region
cagagauauugauuaucau

SEQ ID NO: 1507 - RNA, 19 nt, Artificial Sequence
  Description of Artificial Sequence:  Target Sequence/siNA sense region
uuaugaggacuuucaggau

SEQ ID NO: 1508 - RNA, 19 nt, Artificial Sequence
  Description of Artificial Sequence:  Target Sequence/siNA sense region
uugcuauuuggaaucuuga

SEQ ID NO: 1509 - RNA, 19 nt, Artificial Sequence
  Description of Artificial Sequence:  Target Sequence/siNA sense region
acguuauaauaaguucaau

SEQ ID NO: 1510 - RNA, 19 nt, Artificial Sequence
  Description of Artificial Sequence:  Target Sequence/siNA sense region
uagugagacaauuauuuaa

SEQ ID NO: 1511 - RNA, 19 nt, Artificial Sequence
  Description of Artificial Sequence:  Target Sequence/siNA sense region
agccucuaacuaagaagaa

SEQ ID NO: 1512 - RNA, 19 nt, Artificial Sequence
  Description of Artificial Sequence:  Target Sequence/siNA sense region
auuauucggaguuagauga

SEQ ID NO: 1513 - RNA, 19 nt, Artificial Sequence
  Description of Artificial Sequence:  Target Sequence/siNA sense region
augaagaaccuauggaguu

SEQ ID NO: 1514 - RNA, 19 nt, Artificial Sequence
  Description of Artificial Sequence:  Target Sequence/siNA sense region
uagauuauccauaaaacga

SEQ ID NO: 1515 - RNA, 19 nt, Artificial Sequence
  Description of Artificial Sequence:  Target Sequence/siNA sense region
aacaugaaaauuauucucu

SEQ ID NO: 1516 - RNA, 19 nt, Artificial Sequence
  Description of Artificial Sequence:  Target Sequence/siNA sense region
uuccugacauugauuguau

SEQ ID NO: 1517 - RNA, 19 nt, Artificial Sequence
  Description of Artificial Sequence:  Target Sequence/siNA sense region
uuuacaucuugcgagcuau

SEQ ID NO: 1518 - RNA, 19 nt, Artificial Sequence
  Description of Artificial Sequence:  Target Sequence/siNA sense region
uaucacuaucaggagugug

SEQ ID NO: 1519 - RNA, 19 nt, Artificial Sequence
  Description of Artificial Sequence:  Target Sequence/siNA sense region
guuagagguacgacuguac

SEQ ID NO: 1520 - RNA, 19 nt, Artificial Sequence
  Description of Artificial Sequence:  Target Sequence/siNA sense region
cuacuaaaagaaccuugcc

SEQ ID NO: 1521 - RNA, 19 nt, Artificial Sequence
  Description of Artificial Sequence:  Target Sequence/siNA sense region
ccaucaggaacauacgagg

SEQ ID NO: 1522 - RNA, 19 nt, Artificial Sequence
  Description of Artificial Sequence:  Target Sequence/siNA sense region
ggcaauucaccauuucacc

SEQ ID NO: 1523 - RNA, 19 nt, Artificial Sequence
  Description of Artificial Sequence:  Target Sequence/siNA sense region
ccucuugcugacaauaaau

SEQ ID NO: 1524 - RNA, 19 nt, Artificial Sequence
  Description of Artificial Sequence:  Target Sequence/siNA sense region
uuugcacuaacuugcacua

SEQ ID NO: 1525 - RNA, 19 nt, Artificial Sequence
  Description of Artificial Sequence:  Target Sequence/siNA sense region
agcacacacuuugcuuuug

SEQ ID NO: 1526 - RNA, 19 nt, Artificial Sequence
  Description of Artificial Sequence:  Target Sequence/siNA sense region
gcuugugcugacgguacuc

SEQ ID NO: 1527 - RNA, 19 nt, Artificial Sequence
  Description of Artificial Sequence:  Target Sequence/siNA sense region
cgacauaccuaucagcugc

SEQ ID NO: 1528 - RNA, 19 nt, Artificial Sequence
  Description of Artificial Sequence:  Target Sequence/siNA sense region
cgugcaagaucaguuucac

SEQ ID NO: 1529 - RNA, 19 nt, Artificial Sequence
  Description of Artificial Sequence:  Target Sequence/siNA sense region
ccaaaacuuuucaucagac

SEQ ID NO: 1530 - RNA, 19 nt, Artificial Sequence
  Description of Artificial Sequence:  Target Sequence/siNA sense region
caagaggagguucaacaag

SEQ ID NO: 1531 - RNA, 19 nt, Artificial Sequence
  Description of Artificial Sequence:  Target Sequence/siNA sense region
gagcucuacucgccacuuu

SEQ ID NO: 1532 - RNA, 19 nt, Artificial Sequence
  Description of Artificial Sequence:  Target Sequence/siNA sense region
uuucucauuguugcugcuc

SEQ ID NO: 1533 - RNA, 19 nt, Artificial Sequence
  Description of Artificial Sequence:  Target Sequence/siNA sense region
cuaguauuuuuaauacuuu

SEQ ID NO: 1534 - RNA, 19 nt, Artificial Sequence
  Description of Artificial Sequence:  Target Sequence/siNA sense region
ugcuucaccauuaagagaa

SEQ ID NO: 1535 - RNA, 19 nt, Artificial Sequence
  Description of Artificial Sequence:  Target Sequence/siNA sense region
aagacagaaugaaugagcu

SEQ ID NO: 1536 - RNA, 19 nt, Artificial Sequence
  Description of Artificial Sequence:  Target Sequence/siNA sense region
ucacuuuaauugacuucua

SEQ ID NO: 1537 - RNA, 19 nt, Artificial Sequence
  Description of Artificial Sequence:  Target Sequence/siNA sense region
auuugugcuuuuuagccuu

SEQ ID NO: 1538 - RNA, 19 nt, Artificial Sequence
  Description of Artificial Sequence:  Target Sequence/siNA sense region
uucugcuauuccuuguuuu

SEQ ID NO: 1539 - RNA, 19 nt, Artificial Sequence
  Description of Artificial Sequence:  Target Sequence/siNA sense region
uaauaaugcuuauuauauu

SEQ ID NO: 1540 - RNA, 19 nt, Artificial Sequence
  Description of Artificial Sequence:  Target Sequence/siNA sense region
uuugguuuucacucgaaau

SEQ ID NO: 1541 - RNA, 19 nt, Artificial Sequence
  Description of Artificial Sequence:  Target Sequence/siNA sense region
uccaggaucuagaagaacc

SEQ ID NO: 1542 - RNA, 19 nt, Artificial Sequence
  Description of Artificial Sequence:  Target Sequence/siNA sense region
cuuguaccaaagucuaaac

SEQ ID NO: 1543 - RNA, 19 nt, Artificial Sequence
  Description of Artificial Sequence:  Target Sequence/siNA sense region
cgaacaugaaacuucucau

SEQ ID NO: 1544 - RNA, 19 nt, Artificial Sequence
  Description of Artificial Sequence:  Target Sequence/siNA sense region
uuguuuugacuuguauuuc

SEQ ID NO: 1545 - RNA, 19 nt, Artificial Sequence
  Description of Artificial Sequence:  Target Sequence/siNA sense region
cucuaugcaguugcauaug

SEQ ID NO: 1546 - RNA, 19 nt, Artificial Sequence
  Description of Artificial Sequence:  Target Sequence/siNA sense region
gcacuguaguacagcgcug

SEQ ID NO: 1547 - RNA, 19 nt, Artificial Sequence
  Description of Artificial Sequence:  Target Sequence/siNA sense region
gugcaucuaauaaaccuca

SEQ ID NO: 1548 - RNA, 19 nt, Artificial Sequence
  Description of Artificial Sequence:  Target Sequence/siNA sense region
augugcuugaagauccuug

SEQ ID NO: 1549 - RNA, 19 nt, Artificial Sequence
  Description of Artificial Sequence:  Target Sequence/siNA sense region
guaagguacaacacuaggg

SEQ ID NO: 1550 - RNA, 19 nt, Artificial Sequence
  Description of Artificial Sequence:  Target Sequence/siNA sense region
gguaauacuuauagcacug

SEQ ID NO: 1551 - RNA, 19 nt, Artificial Sequence
  Description of Artificial Sequence:  Target Sequence/siNA sense region
gcuuggcuuugugcucuag

SEQ ID NO: 1552 - RNA, 19 nt, Artificial Sequence
  Description of Artificial Sequence:  Target Sequence/siNA sense region
ggaaagguuuuaccuuuuc

SEQ ID NO: 1553 - RNA, 19 nt, Artificial Sequence
  Description of Artificial Sequence:  Target Sequence/siNA sense region
cauagauggcacacuaugg

SEQ ID NO: 1554 - RNA, 19 nt, Artificial Sequence
  Description of Artificial Sequence:  Target Sequence/siNA sense region
guucaaacaugcacaccua

SEQ ID NO: 1555 - RNA, 19 nt, Artificial Sequence
  Description of Artificial Sequence:  Target Sequence/siNA sense region
aauguuacuaucaacuguc

SEQ ID NO: 1556 - RNA, 19 nt, Artificial Sequence
  Description of Artificial Sequence:  Target Sequence/siNA sense region
caagauccagcugguggug

SEQ ID NO: 1557 - RNA, 19 nt, Artificial Sequence
  Description of Artificial Sequence:  Target Sequence/siNA sense region
gcgcuuauagcuagguguu

SEQ ID NO: 1558 - RNA, 19 nt, Artificial Sequence
  Description of Artificial Sequence:  Target Sequence/siNA sense region
ugguaccuucaugaagguc

SEQ ID NO: 1559 - RNA, 19 nt, Artificial Sequence
  Description of Artificial Sequence:  Target Sequence/siNA sense region
caccaaacugcugcauuua

SEQ ID NO: 1560 - RNA, 19 nt, Artificial Sequence
  Description of Artificial Sequence:  Target Sequence/siNA sense region
agagacguacuuguuguuu

SEQ ID NO: 1561 - RNA, 19 nt, Artificial Sequence
  Description of Artificial Sequence:  Target Sequence/siNA sense region
uuaaauaaacgaacaaauu

SEQ ID NO: 1562 - RNA, 19 nt, Artificial Sequence
  Description of Artificial Sequence:  Target Sequence/siNA sense region
uaaaaugucugauaaugga

SEQ ID NO: 1563 - RNA, 19 nt, Artificial Sequence
  Description of Artificial Sequence:  Target Sequence/siNA sense region
accccaaucaaaccaacgu

SEQ ID NO: 1564 - RNA, 19 nt, Artificial Sequence
  Description of Artificial Sequence:  Target Sequence/siNA sense region
uagugccccccgcauuaca

SEQ ID NO: 1565 - RNA, 19 nt, Artificial Sequence
  Description of Artificial Sequence:  Target Sequence/siNA sense region
auuugguggacccacagau

SEQ ID NO: 1566 - RNA, 19 nt, Artificial Sequence
  Description of Artificial Sequence:  Target Sequence/siNA sense region
uucaacugacaauaaccag

SEQ ID NO: 1567 - RNA, 19 nt, Artificial Sequence
  Description of Artificial Sequence:  Target Sequence/siNA sense region
gaauggaggacgcaauggg

SEQ ID NO: 1568 - RNA, 19 nt, Artificial Sequence
  Description of Artificial Sequence:  Target Sequence/siNA sense region
ggcaaggccaaaacagcgc

SEQ ID NO: 1569 - RNA, 19 nt, Artificial Sequence
  Description of Artificial Sequence:  Target Sequence/siNA sense region
ccgaccccaagguuuaccc

SEQ ID NO: 1570 - RNA, 19 nt, Artificial Sequence
  Description of Artificial Sequence:  Target Sequence/siNA sense region
caauaauacugcgucuugg

SEQ ID NO: 1571 - RNA, 19 nt, Artificial Sequence
  Description of Artificial Sequence:  Target Sequence/siNA sense region
guucacagcucucacucag

SEQ ID NO: 1572 - RNA, 19 nt, Artificial Sequence
  Description of Artificial Sequence:  Target Sequence/siNA sense region
gcauggcaaggaggaacuu

SEQ ID NO: 1573 - RNA, 19 nt, Artificial Sequence
  Description of Artificial Sequence:  Target Sequence/siNA sense region
uagauucccucgaggccag

SEQ ID NO: 1574 - RNA, 19 nt, Artificial Sequence
  Description of Artificial Sequence:  Target Sequence/siNA sense region
gggcguuccaaucaacacc

SEQ ID NO: 1575 - RNA, 19 nt, Artificial Sequence
  Description of Artificial Sequence:  Target Sequence/siNA sense region
caauagugguccagaugac

SEQ ID NO: 1576 - RNA, 19 nt, Artificial Sequence
  Description of Artificial Sequence:  Target Sequence/siNA sense region
ccaaauuggcuacuaccga

SEQ ID NO: 1577 - RNA, 19 nt, Artificial Sequence
  Description of Artificial Sequence:  Target Sequence/siNA sense region
aagagcuacccgacgaguu

SEQ ID NO: 1578 - RNA, 19 nt, Artificial Sequence
  Description of Artificial Sequence:  Target Sequence/siNA sense region
ucgugguggugacggcaaa

SEQ ID NO: 1579 - RNA, 19 nt, Artificial Sequence
  Description of Artificial Sequence:  Target Sequence/siNA sense region
aaugaaagagcucagcccc

SEQ ID NO: 1580 - RNA, 19 nt, Artificial Sequence
  Description of Artificial Sequence:  Target Sequence/siNA sense region
cagaugguacuucuauuac

SEQ ID NO: 1581 - RNA, 19 nt, Artificial Sequence
  Description of Artificial Sequence:  Target Sequence/siNA sense region
ccuaggaacuggcccagaa

SEQ ID NO: 1582 - RNA, 19 nt, Artificial Sequence
  Description of Artificial Sequence:  Target Sequence/siNA sense region
agcuucacuucccuacggc

SEQ ID NO: 1583 - RNA, 19 nt, Artificial Sequence
  Description of Artificial Sequence:  Target Sequence/siNA sense region
cgcuaacaaagaaggcauc

SEQ ID NO: 1584 - RNA, 19 nt, Artificial Sequence
  Description of Artificial Sequence:  Target Sequence/siNA sense region
cguauggguugcaacugag

SEQ ID NO: 1585 - RNA, 19 nt, Artificial Sequence
  Description of Artificial Sequence:  Target Sequence/siNA sense region
gggagccuugaauacaccc

SEQ ID NO: 1586 - RNA, 19 nt, Artificial Sequence
  Description of Artificial Sequence:  Target Sequence/siNA sense region
caaagaccacauuggcacc

SEQ ID NO: 1587 - RNA, 19 nt, Artificial Sequence
  Description of Artificial Sequence:  Target Sequence/siNA sense region
ccgcaauccuaauaacaau

SEQ ID NO: 1588 - RNA, 19 nt, Artificial Sequence
  Description of Artificial Sequence:  Target Sequence/siNA sense region
ugcugccaccgugcuacaa

SEQ ID NO: 1589 - RNA, 19 nt, Artificial Sequence
  Description of Artificial Sequence:  Target Sequence/siNA sense region
acuuccucaaggaacaaca

SEQ ID NO: 1590 - RNA, 19 nt, Artificial Sequence
  Description of Artificial Sequence:  Target Sequence/siNA sense region
auugccaaaaggcuucuac

SEQ ID NO: 1591 - RNA, 19 nt, Artificial Sequence
  Description of Artificial Sequence:  Target Sequence/siNA sense region
cgcagagggaagcagaggc

SEQ ID NO: 1592 - RNA, 19 nt, Artificial Sequence
  Description of Artificial Sequence:  Target Sequence/siNA sense region
cggcagucaagccucuucu

SEQ ID NO: 1593 - RNA, 19 nt, Artificial Sequence
  Description of Artificial Sequence:  Target Sequence/siNA sense region
ucgcuccucaucacguagu

SEQ ID NO: 1594 - RNA, 19 nt, Artificial Sequence
  Description of Artificial Sequence:  Target Sequence/siNA sense region
ucgcgguaauucaagaaau

SEQ ID NO: 1595 - RNA, 19 nt, Artificial Sequence
  Description of Artificial Sequence:  Target Sequence/siNA sense region
uucaacuccuggcagcagu

SEQ ID NO: 1596 - RNA, 19 nt, Artificial Sequence
  Description of Artificial Sequence:  Target Sequence/siNA sense region
uaggggaaauucuccugcu

SEQ ID NO: 1597 - RNA, 19 nt, Artificial Sequence
  Description of Artificial Sequence:  Target Sequence/siNA sense region
ucgaauggcuagcggaggu

SEQ ID NO: 1598 - RNA, 19 nt, Artificial Sequence
  Description of Artificial Sequence:  Target Sequence/siNA sense region
uggugaaacugcccucgcg

SEQ ID NO: 1599 - RNA, 19 nt, Artificial Sequence
  Description of Artificial Sequence:  Target Sequence/siNA sense region
gcuauugcugcuagacaga

SEQ ID NO: 1600 - RNA, 19 nt, Artificial Sequence
  Description of Artificial Sequence:  Target Sequence/siNA sense region
auugaaccagcuugagagc

SEQ ID NO: 1601 - RNA, 19 nt, Artificial Sequence
  Description of Artificial Sequence:  Target Sequence/siNA sense region
caaaguuucugguaaaggc

SEQ ID NO: 1602 - RNA, 19 nt, Artificial Sequence
  Description of Artificial Sequence:  Target Sequence/siNA sense region
ccaacaacaacaaggccaa

SEQ ID NO: 1603 - RNA, 19 nt, Artificial Sequence
  Description of Artificial Sequence:  Target Sequence/siNA sense region
aacugucacuaagaaaucu

SEQ ID NO: 1604 - RNA, 19 nt, Artificial Sequence
  Description of Artificial Sequence:  Target Sequence/siNA sense region
ugcugcugaggcaucuaaa

SEQ ID NO: 1605 - RNA, 19 nt, Artificial Sequence
  Description of Artificial Sequence:  Target Sequence/siNA sense region
aaagccucgccaaaaacgu

SEQ ID NO: 1606 - RNA, 19 nt, Artificial Sequence
  Description of Artificial Sequence:  Target Sequence/siNA sense region
uacugccacaaaacaguac

SEQ ID NO: 1607 - RNA, 19 nt, Artificial Sequence
  Description of Artificial Sequence:  Target Sequence/siNA sense region
caacgucacucaagcauuu

SEQ ID NO: 1608 - RNA, 19 nt, Artificial Sequence
  Description of Artificial Sequence:  Target Sequence/siNA sense region
ugggagacgugguccagaa

SEQ ID NO: 1609 - RNA, 19 nt, Artificial Sequence
  Description of Artificial Sequence:  Target Sequence/siNA sense region
acaaacccaaggaaauuuc

SEQ ID NO: 1610 - RNA, 19 nt, Artificial Sequence
  Description of Artificial Sequence:  Target Sequence/siNA sense region
cggggaccaagaccuaauc

SEQ ID NO: 1611 - RNA, 19 nt, Artificial Sequence
  Description of Artificial Sequence:  Target Sequence/siNA sense region
cagacaaggaacugauuac

SEQ ID NO: 1612 - RNA, 19 nt, Artificial Sequence
  Description of Artificial Sequence:  Target Sequence/siNA sense region
caaacauuggccgcaaauu

SEQ ID NO: 1613 - RNA, 19 nt, Artificial Sequence
  Description of Artificial Sequence:  Target Sequence/siNA sense region
ugcacaauuugcuccaagu

SEQ ID NO: 1614 - RNA, 19 nt, Artificial Sequence
  Description of Artificial Sequence:  Target Sequence/siNA sense region
ugccucugcauucuuugga

SEQ ID NO: 1615 - RNA, 19 nt, Artificial Sequence
  Description of Artificial Sequence:  Target Sequence/siNA sense region
aaugucacgcauuggcaug

SEQ ID NO: 1616 - RNA, 19 nt, Artificial Sequence
  Description of Artificial Sequence:  Target Sequence/siNA sense region
ggaagucacaccuucggga

SEQ ID NO: 1617 - RNA, 19 nt, Artificial Sequence
  Description of Artificial Sequence:  Target Sequence/siNA sense region
aacauggcugacuuaucau

SEQ ID NO: 1618 - RNA, 19 nt, Artificial Sequence
  Description of Artificial Sequence:  Target Sequence/siNA sense region
uggagccauuaaauuggau

SEQ ID NO: 1619 - RNA, 19 nt, Artificial Sequence
  Description of Artificial Sequence:  Target Sequence/siNA sense region
ugacaaagauccacaauuc

SEQ ID NO: 1620 - RNA, 19 nt, Artificial Sequence
  Description of Artificial Sequence:  Target Sequence/siNA sense region
caaagacaacgucauacug

SEQ ID NO: 1621 - RNA, 19 nt, Artificial Sequence
  Description of Artificial Sequence:  Target Sequence/siNA sense region
gcugaacaagcacauugac

SEQ ID NO: 1622 - RNA, 19 nt, Artificial Sequence
  Description of Artificial Sequence:  Target Sequence/siNA sense region
cgcauacaaaacauuccca

SEQ ID NO: 1623 - RNA, 19 nt, Artificial Sequence
  Description of Artificial Sequence:  Target Sequence/siNA sense region
accaacagagccuaaaaag

SEQ ID NO: 1624 - RNA, 19 nt, Artificial Sequence
  Description of Artificial Sequence:  Target Sequence/siNA sense region
ggacaaaaagaaaaagacu

SEQ ID NO: 1625 - RNA, 19 nt, Artificial Sequence
  Description of Artificial Sequence:  Target Sequence/siNA sense region
ugaugaagcucagccuuug

SEQ ID NO: 1626 - RNA, 19 nt, Artificial Sequence
  Description of Artificial Sequence:  Target Sequence/siNA sense region
gccgcagagacaaaagaag

SEQ ID NO: 1627 - RNA, 19 nt, Artificial Sequence
  Description of Artificial Sequence:  Target Sequence/siNA sense region
gcagcccacugugacucuu

SEQ ID NO: 1628 - RNA, 19 nt, Artificial Sequence
  Description of Artificial Sequence:  Target Sequence/siNA sense region
ucuuccugcggcugacaug

SEQ ID NO: 1629 - RNA, 19 nt, Artificial Sequence
  Description of Artificial Sequence:  Target Sequence/siNA sense region
ggaugauuucuccagacaa

SEQ ID NO: 1630 - RNA, 19 nt, Artificial Sequence
  Description of Artificial Sequence:  Target Sequence/siNA sense region
acuucaaaauuccaugagu

SEQ ID NO: 1631 - RNA, 19 nt, Artificial Sequence
  Description of Artificial Sequence:  Target Sequence/siNA sense region
uggagcuucugcugauuca

SEQ ID NO: 1632 - RNA, 19 nt, Artificial Sequence
  Description of Artificial Sequence:  Target Sequence/siNA sense region
aacucaggcauaaacacuc

SEQ ID NO: 1633 - RNA, 19 nt, Artificial Sequence
  Description of Artificial Sequence:  Target Sequence/siNA sense region
caugaugaccacacaaggc

SEQ ID NO: 1634 - RNA, 19 nt, Artificial Sequence
  Description of Artificial Sequence:  Target Sequence/siNA sense region
cagaugggcuauguaaacg

SEQ ID NO: 1635 - RNA, 19 nt, Artificial Sequence
  Description of Artificial Sequence:  Target Sequence/siNA sense region
guuuucgcaauuccguuua

SEQ ID NO: 1636 - RNA, 19 nt, Artificial Sequence
  Description of Artificial Sequence:  Target Sequence/siNA sense region
acgauacauagucuacucu

SEQ ID NO: 1637 - RNA, 19 nt, Artificial Sequence
  Description of Artificial Sequence:  Target Sequence/siNA sense region
uugugcagaaugaauucuc

SEQ ID NO: 1638 - RNA, 19 nt, Artificial Sequence
  Description of Artificial Sequence:  Target Sequence/siNA sense region
cguaacuaaacagcacaag

SEQ ID NO: 1639 - RNA, 19 nt, Artificial Sequence
  Description of Artificial Sequence:  Target Sequence/siNA sense region
guagguuuaguuaacuuua

SEQ ID NO: 1640 - RNA, 19 nt, Artificial Sequence
  Description of Artificial Sequence:  Target Sequence/siNA sense region
aaucucacauagcaaucuu

SEQ ID NO: 1641 - RNA, 19 nt, Artificial Sequence
  Description of Artificial Sequence:  Target Sequence/siNA sense region
uuaaucaauguguaacauu

SEQ ID NO: 1642 - RNA, 19 nt, Artificial Sequence
  Description of Artificial Sequence:  Target Sequence/siNA sense region
uagggaggacuugaaagag

SEQ ID NO: 1643 - RNA, 19 nt, Artificial Sequence
  Description of Artificial Sequence:  Target Sequence/siNA sense region
gccaccacauuuucaucga

SEQ ID NO: 1644 - RNA, 19 nt, Artificial Sequence
  Description of Artificial Sequence:  Target Sequence/siNA sense region
aggccacgcggaguacgau

SEQ ID NO: 1645 - RNA, 19 nt, Artificial Sequence
  Description of Artificial Sequence:  Target Sequence/siNA sense region
ucgaggguacagugaauaa

SEQ ID NO: 1646 - RNA, 19 nt, Artificial Sequence
  Description of Artificial Sequence:  Target Sequence/siNA sense region
augcuagggagagcugccu

SEQ ID NO: 1647 - RNA, 19 nt, Artificial Sequence
  Description of Artificial Sequence:  Target Sequence/siNA sense region
uauauggaagagcccuaau

SEQ ID NO: 1648 - RNA, 19 nt, Artificial Sequence
  Description of Artificial Sequence:  Target Sequence/siNA sense region
uguguaaaauuaauuuuag

SEQ ID NO: 1649 - RNA, 19 nt, Artificial Sequence
  Description of Artificial Sequence:  Target Sequence/siNA sense region
guagugcuauccccaugug

SEQ ID NO: 1650 - RNA, 19 nt, Artificial Sequence
  Description of Artificial Sequence:  Target Sequence/siNA sense region
gauuuuaauagcuucuuag

SEQ ID NO: 1651 - RNA, 19 nt, Artificial Sequence
  Description of Artificial Sequence:  Target Sequence/siNA sense region
ggagaaugacaaaaaaaaa

SEQ ID NO: 1652 - RNA, 19 nt, Artificial Sequence
  Description of Artificial Sequence:  siNA antisense region
ugguuggcuuuuccugggu

SEQ ID NO: 1653 - RNA, 19 nt, Artificial Sequence
  Description of Artificial Sequence:  siNA antisense region
ucuacaagagaucgagguu

SEQ ID NO: 1654 - RNA, 19 nt, Artificial Sequence
  Description of Artificial Sequence:  siNA antisense region
guucguuuagagaacagau

SEQ ID NO: 1655 - RNA, 19 nt, Artificial Sequence
  Description of Artificial Sequence:  siNA antisense region
agcuacacagauuuuaaag

SEQ ID NO: 1656 - RNA, 19 nt, Artificial Sequence
  Description of Artificial Sequence:  siNA antisense region
ggcaugcagccgagcgaca

SEQ ID NO: 1657 - RNA, 19 nt, Artificial Sequence
  Description of Artificial Sequence:  siNA antisense region
uacugcguaggugcacuag

SEQ ID NO: 1658 - RNA, 19 nt, Artificial Sequence
  Description of Artificial Sequence:  siNA antisense region
aaaauuuauuauuguuuau

SEQ ID NO: 1659 - RNA, 19 nt, Artificial Sequence
  Description of Artificial Sequence:  siNA antisense region
uuucuugucaacgacagua

SEQ ID NO: 1660 - RNA, 19 nt, Artificial Sequence
  Description of Artificial Sequence:  siNA antisense region
agagggacgaguuacucgu

SEQ ID NO: 1661 - RNA, 19 nt, Artificial Sequence
  Description of Artificial Sequence:  siNA antisense region
ccguaagcagucugcagaa

SEQ ID NO: 1662 - RNA, 19 nt, Artificial Sequence
  Description of Artificial Sequence:  siNA antisense region
acugcaacacggacgaaac

SEQ ID NO: 1663 - RNA, 19 nt, Artificial Sequence
  Description of Artificial Sequence:  siNA antisense region
uagguaugcugaugaucga

SEQ ID NO: 1664 - RNA, 19 nt, Artificial Sequence
  Description of Artificial Sequence:  siNA antisense region
ucacacccggacgaaaccu

SEQ ID NO: 1665 - RNA, 19 nt, Artificial Sequence
  Description of Artificial Sequence:  siNA antisense region
cuccaucuuaccuuucggu

SEQ ID NO: 1666 - RNA, 19 nt, Artificial Sequence
  Description of Artificial Sequence:  siNA antisense region
gacaccaagaacaaggcuc

SEQ ID NO: 1667 - RNA, 19 nt, Artificial Sequence
  Description of Artificial Sequence:  siNA antisense region
gacguguguuuucucguug

SEQ ID NO: 1668 - RNA, 19 nt, Artificial Sequence
  Description of Artificial Sequence:  siNA antisense region
gacaggcaaacugaguugg

SEQ ID NO: 1669 - RNA, 19 nt, Artificial Sequence
  Description of Artificial Sequence:  siNA antisense region
cacgucucuaaccugaagg

SEQ ID NO: 1670 - RNA, 19 nt, Artificial Sequence
  Description of Artificial Sequence:  siNA antisense region
cccgaagccacgcacuagc

SEQ ID NO: 1671 - RNA, 19 nt, Artificial Sequence
  Description of Artificial Sequence:  siNA antisense region
ggccucuuccacagagucc

SEQ ID NO: 1672 - RNA, 19 nt, Artificial Sequence
  Description of Artificial Sequence:  siNA antisense region
uucacgugccuccgauagg

SEQ ID NO: 1673 - RNA, 19 nt, Artificial Sequence
  Description of Artificial Sequence:  siNA antisense region
agugccauuuuugaggugu

SEQ ID NO: 1674 - RNA, 19 nt, Artificial Sequence
  Description of Artificial Sequence:  siNA antisense region
cagcucuacuagaccacaa

SEQ ID NO: 1675 - RNA, 19 nt, Artificial Sequence
  Description of Artificial Sequence:  siNA antisense region
gggcaguacgccuuuuucc

SEQ ID NO: 1676 - RNA, 19 nt, Artificial Sequence
  Description of Artificial Sequence:  siNA antisense region
auagggcuguucaagcugg

SEQ ID NO: 1677 - RNA, 19 nt, Artificial Sequence
  Description of Artificial Sequence:  siNA antisense region
agaacguuuaaugaacaca

SEQ ID NO: 1678 - RNA, 19 nt, Artificial Sequence
  Description of Artificial Sequence:  siNA antisense region
auuggugcuuaaggcauca

SEQ ID NO: 1679 - RNA, 19 nt, Artificial Sequence
  Description of Artificial Sequence:  siNA antisense region
aacgaccuuguggccguga

SEQ ID NO: 1680 - RNA, 19 nt, Artificial Sequence
  Description of Artificial Sequence:  siNA antisense region
cauuucugcaaccagcuca

SEQ ID NO: 1681 - RNA, 19 nt, Artificial Sequence
  Description of Artificial Sequence:  siNA antisense region
accguacugaaugccgucc

SEQ ID NO: 1682 - RNA, 19 nt, Artificial Sequence
  Description of Artificial Sequence:  siNA antisense region
caguguuauaccgcuacga

SEQ ID NO: 1683 - RNA, 19 nt, Artificial Sequence
  Description of Artificial Sequence:  siNA antisense region
auguggcacgaguacuccc

SEQ ID NO: 1684 - RNA, 19 nt, Artificial Sequence
  Description of Artificial Sequence:  siNA antisense region
aauugggguuucgcccaca

SEQ ID NO: 1685 - RNA, 19 nt, Artificial Sequence
  Description of Artificial Sequence:  siNA antisense region
aagaacauugcgguaugca

SEQ ID NO: 1686 - RNA, 19 nt, Artificial Sequence
  Description of Artificial Sequence:  siNA antisense region
auuaccguucuuacgaaga

SEQ ID NO: 1687 - RNA, 19 nt, Artificial Sequence
  Description of Artificial Sequence:  siNA antisense region
augaccaccggcucccuua

SEQ ID NO: 1688 - RNA, 19 nt, Artificial Sequence
  Description of Artificial Sequence:  siNA antisense region
uagaucgaugccauagcua

SEQ ID NO: 1689 - RNA, 19 nt, Artificial Sequence
  Description of Artificial Sequence:  siNA antisense region
accuaagucauaagacuuu

SEQ ID NO: 1690 - RNA, 19 nt, Artificial Sequence
  Description of Artificial Sequence:  siNA antisense region
aucagugccaagcucguca

SEQ ID NO: 1691 - RNA, 19 nt, Artificial Sequence
  Description of Artificial Sequence:  siNA antisense region
uucauaaucuucaauggga

SEQ ID NO: 1692 - RNA, 19 nt, Artificial Sequence
  Description of Artificial Sequence:  siNA antisense region
cuuaguguuccaguuuugu

SEQ ID NO: 1693 - RNA, 19 nt, Artificial Sequence
  Description of Artificial Sequence:  siNA antisense region
gagugcaccacugccaugc

SEQ ID NO: 1694 - RNA, 19 nt, Artificial Sequence
  Description of Artificial Sequence:  siNA antisense region
cucacgagugaguucacgg

SEQ ID NO: 1695 - RNA, 19 nt, Artificial Sequence
  Description of Artificial Sequence:  siNA antisense region
gacugcaccuccauugagc

SEQ ID NO: 1696 - RNA, 19 nt, Artificial Sequence
  Description of Artificial Sequence:  siNA antisense region
guugucgacauagcgagug

SEQ ID NO: 1697 - RNA, 19 nt, Artificial Sequence
  Description of Artificial Sequence:  siNA antisense region
aucugggccacagaaauug

SEQ ID NO: 1698 - RNA, 19 nt, Artificial Sequence
  Description of Artificial Sequence:  siNA antisense region
gcaaucaagaggguaccca

SEQ ID NO: 1699 - RNA, 19 nt, Artificial Sequence
  Description of Artificial Sequence:  siNA antisense region
ugcgagaaaaucuuugaug

SEQ ID NO: 1700 - RNA, 19 nt, Artificial Sequence
  Description of Artificial Sequence:  siNA antisense region
cauugacuugcccgcgcgu

SEQ ID NO: 1701 - RNA, 19 nt, Artificial Sequence
  Description of Artificial Sequence:  siNA antisense region
uuguucggaaagagugcac

SEQ ID NO: 1702 - RNA, 19 nt, Artificial Sequence
  Description of Artificial Sequence:  siNA antisense region
cgacucgauguaaucaagu

SEQ ID NO: 1703 - RNA, 19 nt, Artificial Sequence
  Description of Artificial Sequence:  siNA antisense region
gcaguagacaccucucuuc

SEQ ID NO: 1704 - RNA, 19 nt, Artificial Sequence
  Description of Artificial Sequence:  siNA antisense region
augcucauggucacggcag

SEQ ID NO: 1705 - RNA, 19 nt, Artificial Sequence
  Description of Artificial Sequence:  siNA antisense region
agugaaccaggcaauuuca

SEQ ID NO: 1706 - RNA, 19 nt, Artificial Sequence
  Description of Artificial Sequence:  siNA antisense region
gcucuuaucagagcgcuca

SEQ ID NO: 1707 - RNA, 19 nt, Artificial Sequence
  Description of Artificial Sequence:  siNA antisense region
gggugucuggugcucguag

SEQ ID NO: 1708 - RNA, 19 nt, Artificial Sequence
  Description of Artificial Sequence:  siNA antisense region
ggcacucuuaauuucgaag

SEQ ID NO: 1709 - RNA, 19 nt, Artificial Sequence
  Description of Artificial Sequence:  siNA antisense region
gaaagugucaaauuucuug

SEQ ID NO: 1710 - RNA, 19 nt, Artificial Sequence
  Description of Artificial Sequence:  siNA antisense region
cuuugggcauuccccuuug

SEQ ID NO: 1711 - RNA, 19 nt, Artificial Sequence
  Description of Artificial Sequence:  siNA antisense region
guuaagaggaaacacaaac

SEQ ID NO: 1712 - RNA, 19 nt, Artificial Sequence
  Description of Artificial Sequence:  siNA antisense region
aaugacuuugacuuuugag

SEQ ID NO: 1713 - RNA, 19 nt, Artificial Sequence
  Description of Artificial Sequence:  siNA antisense region
cuuuucaacacgugguuga

SEQ ID NO: 1714 - RNA, 19 nt, Artificial Sequence
  Description of Artificial Sequence:  siNA antisense region
gaaacccucagucuuuuuc

SEQ ID NO: 1715 - RNA, 19 nt, Artificial Sequence
  Description of Artificial Sequence:  siNA antisense region
agagcguauacgccccaug

SEQ ID NO: 1716 - RNA, 19 nt, Artificial Sequence
  Description of Artificial Sequence:  siNA antisense region
agaugcaacaggguacaca

SEQ ID NO: 1717 - RNA, 19 nt, Artificial Sequence
  Description of Artificial Sequence:  siNA antisense region
auuguuacacuccugugga

SEQ ID NO: 1718 - RNA, 19 nt, Artificial Sequence
  Description of Artificial Sequence:  siNA antisense region
caagguagacaagugcaua

SEQ ID NO: 1719 - RNA, 19 nt, Artificial Sequence
  Description of Artificial Sequence:  siNA antisense region
gcaaugauuacauuucauc

SEQ ID NO: 1720 - RNA, 19 nt, Artificial Sequence
  Description of Artificial Sequence:  siNA antisense region
cugccaugaaacuucaucg

SEQ ID NO: 1721 - RNA, 19 nt, Artificial Sequence
  Description of Artificial Sequence:  siNA antisense region
uuucagaaagucgcacguc

SEQ ID NO: 1722 - RNA, 19 nt, Artificial Sequence
  Description of Artificial Sequence:  siNA antisense region
acaauguucacaaguggcu

SEQ ID NO: 1723 - RNA, 19 nt, Artificial Sequence
  Description of Artificial Sequence:  siNA antisense region
aacuaaauuuucagugcca

SEQ ID NO: 1724 - RNA, 19 nt, Artificial Sequence
  Description of Artificial Sequence:  siNA antisense region
uguaguagguccuucaaua

SEQ ID NO: 1725 - RNA, 19 nt, Artificial Sequence
  Description of Artificial Sequence:  siNA antisense region
aguagguagguacccacau

SEQ ID NO: 1726 - RNA, 19 nt, Artificial Sequence
  Description of Artificial Sequence:  siNA antisense region
cauuuucacuacagcauua

SEQ ID NO: 1727 - RNA, 19 nt, Artificial Sequence
  Description of Artificial Sequence:  siNA antisense region
uugacaggcaggacauggc

SEQ ID NO: 1728 - RNA, 19 nt, Artificial Sequence
  Description of Artificial Sequence:  siNA antisense region
agguccaaucucugggucu

SEQ ID NO: 1729 - RNA, 19 nt, Artificial Sequence
  Description of Artificial Sequence:  siNA antisense region
aucugcaacacuaugcuca

SEQ ID NO: 1730 - RNA, 19 nt, Artificial Sequence
  Description of Artificial Sequence:  siNA antisense region
guuugagugguugugauaa

SEQ ID NO: 1731 - RNA, 19 nt, Artificial Sequence
  Description of Artificial Sequence:  siNA antisense region
gcggagucgaguuucaaug

SEQ ID NO: 1732 - RNA, 19 nt, Artificial Sequence
  Description of Artificial Sequence:  siNA antisense region
ucuaguccuaccucccuug

SEQ ID NO: 1733 - RNA, 19 nt, Artificial Sequence
  Description of Artificial Sequence:  siNA antisense region
cacacagccuccaaaacau

SEQ ID NO: 1734 - RNA, 19 nt, Artificial Sequence
  Description of Artificial Sequence:  siNA antisense region
gcagccaacauaggcaaac

SEQ ID NO: 1735 - RNA, 19 nt, Artificial Sequence
  Description of Artificial Sequence:  siNA antisense region
guaggcacgcuuauuauag

SEQ ID NO: 1736 - RNA, 19 nt, Artificial Sequence
  Description of Artificial Sequence:  siNA antisense region
acuagcacgaggaacccag

SEQ ID NO: 1737 - RNA, 19 nt, Artificial Sequence
  Description of Artificial Sequence:  siNA antisense region
gccugagccaauaucagca

SEQ ID NO: 1738 - RNA, 19 nt, Artificial Sequence
  Description of Artificial Sequence:  siNA antisense region
accaguaaugccaguaugg

SEQ ID NO: 1739 - RNA, 19 nt, Artificial Sequence
  Description of Artificial Sequence:  siNA antisense region
caaggucuccacauuguca

SEQ ID NO: 1740 - RNA, 19 nt, Artificial Sequence
  Description of Artificial Sequence:  siNA antisense region
cucaaggagauccucauuc

SEQ ID NO: 1741 - RNA, 19 nt, Artificial Sequence
  Description of Artificial Sequence:  siNA antisense region
acguucacgacucaguauc

SEQ ID NO: 1742 - RNA, 19 nt, Artificial Sequence
  Description of Artificial Sequence:  siNA antisense region
aacaauguuaauguuaaca

SEQ ID NO: 1743 - RNA, 19 nt, Artificial Sequence
  Description of Artificial Sequence:  siNA antisense region
auucaaaugaaaaucgcca

SEQ ID NO: 1744 - RNA, 19 nt, Artificial Sequence
  Description of Artificial Sequence:  siNA antisense region
aaugauggcaaccucuuca

SEQ ID NO: 1745 - RNA, 19 nt, Artificial Sequence
  Description of Artificial Sequence:  siNA antisense region
agcagagaaagaugccaaa

SEQ ID NO: 1746 - RNA, 19 nt, Artificial Sequence
  Description of Artificial Sequence:  siNA antisense region
aauaaaggcacuuguagaa

SEQ ID NO: 1747 - RNA, 19 nt, Artificial Sequence
  Description of Artificial Sequence:  siNA antisense region
aagacucuuuauaguguca

SEQ ID NO: 1748 - RNA, 19 nt, Artificial Sequence
  Description of Artificial Sequence:  siNA antisense region
uuugaaagacuuguaauca

SEQ ID NO: 1749 - RNA, 19 nt, Artificial Sequence
  Description of Artificial Sequence:  siNA antisense region
gcaggacucaacaaugguu

SEQ ID NO: 1750 - RNA, 19 nt, Artificial Sequence
  Description of Artificial Sequence:  siNA antisense region
gguaacuuuauaguuaccg

SEQ ID NO: 1751 - RNA, 19 nt, Artificial Sequence
  Description of Artificial Sequence:  siNA antisense region
uuuuacgggcuuucccuug

SEQ ID NO: 1752 - RNA, 19 nt, Artificial Sequence
  Description of Artificial Sequence:  siNA antisense region
uccaauguuccaagcaccu

SEQ ID NO: 1753 - RNA, 19 nt, Artificial Sequence
  Description of Artificial Sequence:  siNA antisense region
uaaaacugaucucuguugu

SEQ ID NO: 1754 - RNA, 19 nt, Artificial Sequence
  Description of Artificial Sequence:  siNA antisense region
aaaaccacacagugguguu

SEQ ID NO: 1755 - RNA, 19 nt, Artificial Sequence
  Description of Artificial Sequence:  siNA antisense region
accagcagccugugaggga

SEQ ID NO: 1756 - RNA, 19 nt, Artificial Sequence
  Description of Artificial Sequence:  siNA antisense region
aaaaauugaucugauaaca

SEQ ID NO: 1757 - RNA, 19 nt, Artificial Sequence
  Description of Artificial Sequence:  siNA antisense region
ugcaucaagugugcgcgca

SEQ ID NO: 1758 - RNA, 19 nt, Artificial Sequence
  Description of Artificial Sequence:  siNA antisense region
aggaauugagugguuugcu

SEQ ID NO: 1759 - RNA, 19 nt, Artificial Sequence
  Description of Artificial Sequence:  siNA antisense region
agcugcucuuugcaaauca

SEQ ID NO: 1760 - RNA, 19 nt, Artificial Sequence
  Description of Artificial Sequence:  siNA antisense region
accaucaaguauggugaca

SEQ ID NO: 1761 - RNA, 19 nt, Artificial Sequence
  Description of Artificial Sequence:  siNA antisense region
uaaugacuguucagaaaua

SEQ ID NO: 1762 - RNA, 19 nt, Artificial Sequence
  Description of Artificial Sequence:  siNA antisense region
cauggcgucgacaagacgu

SEQ ID NO: 1763 - RNA, 19 nt, Artificial Sequence
  Description of Artificial Sequence:  siNA antisense region
caggucugaaguauaaacc

SEQ ID NO: 1764 - RNA, 19 nt, Artificial Sequence
  Description of Artificial Sequence:  siNA antisense region
aaugacacuguuggugagc

SEQ ID NO: 1765 - RNA, 19 nt, Artificial Sequence
  Description of Artificial Sequence:  siNA antisense region
aguuacauaugccauaaua

SEQ ID NO: 1766 - RNA, 19 nt, Artificial Sequence
  Description of Artificial Sequence:  siNA antisense region
cuguuguacaagaccacca

SEQ ID NO: 1767 - RNA, 19 nt, Artificial Sequence
  Description of Artificial Sequence:  siNA antisense region
agacaaccacugagaaguc

SEQ ID NO: 1768 - RNA, 19 nt, Artificial Sequence
  Description of Artificial Sequence:  siNA antisense region
aguagugcccaaaagauua

SEQ ID NO: 1769 - RNA, 19 nt, Artificial Sequence
  Description of Artificial Sequence:  siNA antisense region
aggccugaguuuuucaaca

SEQ ID NO: 1770 - RNA, 19 nt, Artificial Sequence
  Description of Artificial Sequence:  siNA antisense region
cucaauccauucaaagaua

SEQ ID NO: 1771 - RNA, 19 nt, Artificial Sequence
  Description of Artificial Sequence:  siNA antisense region
uccugcacuaaguuucgcc

SEQ ID NO: 1772 - RNA, 19 nt, Artificial Sequence
  Description of Artificial Sequence:  siNA antisense region
auccuugagaaauucaacu

SEQ ID NO: 1773 - RNA, 19 nt, Artificial Sequence
  Description of Artificial Sequence:  siNA antisense region
uuugagaaucucccaagca

SEQ ID NO: 1774 - RNA, 19 nt, Artificial Sequence
  Description of Artificial Sequence:  siNA antisense region
aacaccuguaaugagaaau

SEQ ID NO: 1775 - RNA, 19 nt, Artificial Sequence
  Description of Artificial Sequence:  siNA antisense region
acccuugacgaugucaaaa

SEQ ID NO: 1776 - RNA, 19 nt, Artificial Sequence
  Description of Artificial Sequence:  siNA antisense region
ugaagcaaccuguauuuga

SEQ ID NO: 1777 - RNA, 19 nt, Artificial Sequence
  Description of Artificial Sequence:  siNA antisense region
acaauccuugauguuaucu

SEQ ID NO: 1778 - RNA, 19 nt, Artificial Sequence
  Description of Artificial Sequence:  siNA antisense region
aucaaugaagcauuuuaca

SEQ ID NO: 1779 - RNA, 19 nt, Artificial Sequence
  Description of Artificial Sequence:  siNA antisense region
gagugccuuguuaacaaca

SEQ ID NO: 1780 - RNA, 19 nt, Artificial Sequence
  Description of Artificial Sequence:  siNA antisense region
uugaucaaugcacauuucg

SEQ ID NO: 1781 - RNA, 19 nt, Artificial Sequence
  Description of Artificial Sequence:  siNA antisense region
ugcgccagcgauagugacu

SEQ ID NO: 1782 - RNA, 19 nt, Artificial Sequence
  Description of Artificial Sequence:  siNA antisense region
guugagugaucgcaacuuu

SEQ ID NO: 1783 - RNA, 19 nt, Artificial Sequence
  Description of Artificial Sequence:  siNA antisense region
gaugaagacuucaccuaag

SEQ ID NO: 1784 - RNA, 19 nt, Artificial Sequence
  Description of Artificial Sequence:  siNA antisense region
aagucccuugcuuugagcg

SEQ ID NO: 1785 - RNA, 19 nt, Artificial Sequence
  Description of Artificial Sequence:  siNA antisense region
acguauacacugacgguaa

SEQ ID NO: 1786 - RNA, 19 nt, Artificial Sequence
  Description of Artificial Sequence:  siNA antisense region
uugcagcugcuccuugcca

SEQ ID NO: 1787 - RNA, 19 nt, Artificial Sequence
  Description of Artificial Sequence:  siNA antisense region
cuuaagaggcaugaguagu

SEQ ID NO: 1788 - RNA, 19 nt, Artificial Sequence
  Description of Artificial Sequence:  siNA antisense region
gguuacuucuuuuggugcc

SEQ ID NO: 1789 - RNA, 19 nt, Artificial Sequence
  Description of Artificial Sequence:  siNA antisense region
ugaaucaccuucaagaaag

SEQ ID NO: 1790 - RNA, 19 nt, Artificial Sequence
  Description of Artificial Sequence:  siNA antisense region
gguaaguacugugucaugu

SEQ ID NO: 1791 - RNA, 19 nt, Artificial Sequence
  Description of Artificial Sequence:  siNA antisense region
gagaacaaccuccucagag

SEQ ID NO: 1792 - RNA, 19 nt, Artificial Sequence
  Description of Artificial Sequence:  siNA antisense region
uucgaguucaccguucuug

SEQ ID NO: 1793 - RNA, 19 nt, Artificial Sequence
  Description of Artificial Sequence:  siNA antisense region
aacgggcgucucgagugcu

SEQ ID NO: 1794 - RNA, 19 nt, Artificial Sequence
  Description of Artificial Sequence:  siNA antisense region
uccauuugugaagcuauca

SEQ ID NO: 1795 - RNA, 19 nt, Artificial Sequence
  Description of Artificial Sequence:  siNA antisense region
uggugugccgacgauagcu

SEQ ID NO: 1796 - RNA, 19 nt, Artificial Sequence
  Description of Artificial Sequence:  siNA antisense region
gaggccauuuacacagacu

SEQ ID NO: 1797 - RNA, 19 nt, Artificial Sequence
  Description of Artificial Sequence:  siNA antisense region
cuuaaucucuaagagcaug

SEQ ID NO: 1798 - RNA, 19 nt, Artificial Sequence
  Description of Artificial Sequence:  siNA antisense region
gcaguauuguucuuugucc

SEQ ID NO: 1799 - RNA, 19 nt, Artificial Sequence
  Description of Artificial Sequence:  siNA antisense region
uaaaccaggagacaaugcg

SEQ ID NO: 1800 - RNA, 19 nt, Artificial Sequence
  Description of Artificial Sequence:  siNA antisense region
gacauuguuuguagccagu

SEQ ID NO: 1801 - RNA, 19 nt, Artificial Sequence
  Description of Artificial Sequence:  siNA antisense region
acccccuuuuaagcgaaag

SEQ ID NO: 1802 - RNA, 19 nt, Artificial Sequence
  Description of Artificial Sequence:  siNA antisense region
uacaccuuuaauuggugca

SEQ ID NO: 1803 - RNA, 19 nt, Artificial Sequence
  Description of Artificial Sequence:  siNA antisense region
aguaucuucuccaaagguu

SEQ ID NO: 1804 - RNA, 19 nt, Artificial Sequence
  Description of Artificial Sequence:  siNA antisense region
accuugaacuucccaaaca

SEQ ID NO: 1805 - RNA, 19 nt, Artificial Sequence
  Description of Artificial Sequence:  siNA antisense region
gauucucacauucuuguaa

SEQ ID NO: 1806 - RNA, 19 nt, Artificial Sequence
  Description of Artificial Sequence:  siNA antisense region
uucaucaagcucaaaugug

SEQ ID NO: 1807 - RNA, 19 nt, Artificial Sequence
  Description of Artificial Sequence:  siNA antisense region
aagcacuuugucaacacgu

SEQ ID NO: 1808 - RNA, 19 nt, Artificial Sequence
  Description of Artificial Sequence:  siNA antisense region
gacagagcacuuuucauua

SEQ ID NO: 1809 - RNA, 19 nt, Artificial Sequence
  Description of Artificial Sequence:  siNA antisense region
accggauucaacaguguag

SEQ ID NO: 1810 - RNA, 19 nt, Artificial Sequence
  Description of Artificial Sequence:  siNA antisense region
aaacucaguaacuucggua

SEQ ID NO: 1811 - RNA, 19 nt, Artificial Sequence
  Description of Artificial Sequence:  siNA antisense region
cucugcuacaacacaugca

SEQ ID NO: 1812 - RNA, 19 nt, Artificial Sequence
  Description of Artificial Sequence:  siNA antisense region
uaaagucuucacaacagcc

SEQ ID NO: 1813 - RNA, 19 nt, Artificial Sequence
  Description of Artificial Sequence:  siNA antisense region
gagaucagaaacugguugu

SEQ ID NO: 1814 - RNA, 19 nt, Artificial Sequence
  Description of Artificial Sequence:  siNA antisense region
aauacccauguugguaagg

SEQ ID NO: 1815 - RNA, 19 nt, Artificial Sequence
  Description of Artificial Sequence:  siNA antisense region
acuccacucaucaagauca

SEQ ID NO: 1816 - RNA, 19 nt, Artificial Sequence
  Description of Artificial Sequence:  siNA antisense region
uaaguagaauguagcuaca

SEQ ID NO: 1817 - RNA, 19 nt, Artificial Sequence
  Description of Artificial Sequence:  siNA antisense region
uucaccagcaucaucaaau

SEQ ID NO: 1818 - RNA, 19 nt, Artificial Sequence
  Description of Artificial Sequence:  siNA antisense region
acgugaugaaaaguuuucu

SEQ ID NO: 1819 - RNA, 19 nt, Artificial Sequence
  Description of Artificial Sequence:  siNA antisense region
guaaaaggaacaauacaua

SEQ ID NO: 1820 - RNA, 19 nt, Artificial Sequence
  Description of Artificial Sequence:  siNA antisense region
uucuuccucaucuggaggg

SEQ ID NO: 1821 - RNA, 19 nt, Artificial Sequence
  Description of Artificial Sequence:  siNA antisense region
acacucugcaucguccucu

SEQ ID NO: 1822 - RNA, 19 nt, Artificial Sequence
  Description of Artificial Sequence:  siNA antisense region
aucaauuucuucuuccuca

SEQ ID NO: 1823 - RNA, 19 nt, Artificial Sequence
  Description of Artificial Sequence:  siNA antisense region
cucauguucacagguuuca

SEQ ID NO: 1824 - RNA, 19 nt, Artificial Sequence
  Description of Artificial Sequence:  siNA antisense region
aucauccucuguaccguac

SEQ ID NO: 1825 - RNA, 19 nt, Artificial Sequence
  Description of Artificial Sequence:  siNA antisense region
cagagggagaccuugauaa

SEQ ID NO: 1826 - RNA, 19 nt, Artificial Sequence
  Description of Artificial Sequence:  siNA antisense region
agcugaggcaccaaauucc

SEQ ID NO: 1827 - RNA, 19 nt, Artificial Sequence
  Description of Artificial Sequence:  siNA antisense region
cucaacucgaacuguuuca

SEQ ID NO: 1828 - RNA, 19 nt, Artificial Sequence
  Description of Artificial Sequence:  siNA antisense region
gucuuccucuucuucuucc

SEQ ID NO: 1829 - RNA, 19 nt, Artificial Sequence
  Description of Artificial Sequence:  siNA antisense region
aguaguaucauccagccag

SEQ ID NO: 1830 - RNA, 19 nt, Artificial Sequence
  Description of Artificial Sequence:  siNA antisense region
cucaaucucugauugcuca

SEQ ID NO: 1831 - RNA, 19 nt, Artificial Sequence
  Description of Artificial Sequence:  siNA antisense region
uguagguucugguucuggc

SEQ ID NO: 1832 - RNA, 19 nt, Artificial Sequence
  Description of Artificial Sequence:  siNA antisense region
auuaacugguucuucaggu

SEQ ID NO: 1833 - RNA, 19 nt, Artificial Sequence
  Description of Artificial Sequence:  siNA antisense region
uaaauaaccaguaaacuga

SEQ ID NO: 1834 - RNA, 19 nt, Artificial Sequence
  Description of Artificial Sequence:  siNA antisense region
aacauugucaguaaguuuu

SEQ ID NO: 1835 - RNA, 19 nt, Artificial Sequence
  Description of Artificial Sequence:  siNA antisense region
gucaacacauuuaauggca

SEQ ID NO: 1836 - RNA, 19 nt, Artificial Sequence
  Description of Artificial Sequence:  siNA antisense region
uugugccuccuuaacgaug

SEQ ID NO: 1837 - RNA, 19 nt, Artificial Sequence
  Description of Artificial Sequence:  siNA antisense region
caccauaggauuagcacuu

SEQ ID NO: 1838 - RNA, 19 nt, Artificial Sequence
  Description of Artificial Sequence:  siNA antisense region
guuagcagcauuuacaauc

SEQ ID NO: 1839 - RNA, 19 nt, Artificial Sequence
  Description of Artificial Sequence:  siNA antisense region
accauguuucagguguaug

SEQ ID NO: 1840 - RNA, 19 nt, Artificial Sequence
  Description of Artificial Sequence:  siNA antisense region
ugcaccugcuacaccacca

SEQ ID NO: 1841 - RNA, 19 nt, Artificial Sequence
  Description of Artificial Sequence:  siNA antisense region
auugguugccuuguugagu

SEQ ID NO: 1842 - RNA, 19 nt, Artificial Sequence
  Description of Artificial Sequence:  siNA antisense region
cuccuuuugcauggcacca

SEQ ID NO: 1843 - RNA, 19 nt, Artificial Sequence
  Description of Artificial Sequence:  siNA antisense region
cuuaauguaaucaucacuc

SEQ ID NO: 1844 - RNA, 19 nt, Artificial Sequence
  Description of Artificial Sequence:  siNA antisense region
uguaagagggccauuuagc

SEQ ID NO: 1845 - RNA, 19 nt, Artificial Sequence
  Description of Artificial Sequence:  siNA antisense region
caaacaagacccuccuacu

SEQ ID NO: 1846 - RNA, 19 nt, Artificial Sequence
  Description of Artificial Sequence:  siNA antisense region
aagauuauguccagaaagc

SEQ ID NO: 1847 - RNA, 19 nt, Artificial Sequence
  Description of Artificial Sequence:  siNA antisense region
augcagacacuucuuagca

SEQ ID NO: 1848 - RNA, 19 nt, Artificial Sequence
  Description of Artificial Sequence:  siNA antisense region
uagguuagguccaacaaca

SEQ ID NO: 1849 - RNA, 19 nt, Artificial Sequence
  Description of Artificial Sequence:  siNA antisense region
gauguccucaccugcauuu

SEQ ID NO: 1850 - RNA, 19 nt, Artificial Sequence
  Description of Artificial Sequence:  siNA antisense region
ugcugccuuaagaagcugg

SEQ ID NO: 1851 - RNA, 19 nt, Artificial Sequence
  Description of Artificial Sequence:  siNA antisense region
ugaauugaaauuuucauau

SEQ ID NO: 1852 - RNA, 19 nt, Artificial Sequence
  Description of Artificial Sequence:  siNA antisense region
ugcaaguaagauguccugu

SEQ ID NO: 1853 - RNA, 19 nt, Artificial Sequence
  Description of Artificial Sequence:  siNA antisense region
gccugcugacaacaauggu

SEQ ID NO: 1854 - RNA, 19 nt, Artificial Sequence
  Description of Artificial Sequence:  siNA antisense region
ugguuuagcaccaaauaug

SEQ ID NO: 1855 - RNA, 19 nt, Artificial Sequence
  Description of Artificial Sequence:  siNA antisense region
cacuuguaaagacugaagu

SEQ ID NO: 1856 - RNA, 19 nt, Artificial Sequence
  Description of Artificial Sequence:  siNA antisense region
acgaaccgucugcacgcac

SEQ ID NO: 1857 - RNA, 19 nt, Artificial Sequence
  Description of Artificial Sequence:  siNA antisense region
ugcaauauaaaccugugua

SEQ ID NO: 1858 - RNA, 19 nt, Artificial Sequence
  Description of Artificial Sequence:  siNA antisense region
aagagcuuugucauugacu

SEQ ID NO: 1859 - RNA, 19 nt, Artificial Sequence
  Description of Artificial Sequence:  siNA antisense region
caugacaaccugcucauaa

SEQ ID NO: 1860 - RNA, 19 nt, Artificial Sequence
  Description of Artificial Sequence:  siNA antisense region
cagguuaucaagauaaucc

SEQ ID NO: 1861 - RNA, 19 nt, Artificial Sequence
  Description of Artificial Sequence:  siNA antisense region
ugcuuccacucuaggcuuc

SEQ ID NO: 1862 - RNA, 19 nt, Artificial Sequence
  Description of Artificial Sequence:  siNA antisense region
uggcuccucuuguuuaggu

SEQ ID NO: 1863 - RNA, 19 nt, Artificial Sequence
  Description of Artificial Sequence:  siNA antisense region
ggaaucuucuguguuuggu

SEQ ID NO: 1864 - RNA, 19 nt, Artificial Sequence
  Description of Artificial Sequence:  siNA antisense region
agauuucuccucaguuuug

SEQ ID NO: 1865 - RNA, 19 nt, Artificial Sequence
  Description of Artificial Sequence:  siNA antisense region
gacaggcuucuguacgaca

SEQ ID NO: 1866 - RNA, 19 nt, Artificial Sequence
  Description of Artificial Sequence:  siNA antisense region
aauuuuuggcuucacaucg

SEQ ID NO: 1867 - RNA, 19 nt, Artificial Sequence
  Description of Artificial Sequence:  siNA antisense region
cucaucaaugcaggccuua

SEQ ID NO: 1868 - RNA, 19 nt, Artificial Sequence
  Description of Artificial Sequence:  siNA antisense region
uuccaguguugugguaacc

SEQ ID NO: 1869 - RNA, 19 nt, Artificial Sequence
  Description of Artificial Sequence:  siNA antisense region
gguaagaaacuuaguuucu

SEQ ID NO: 1870 - RNA, 19 nt, Artificial Sequence
  Description of Artificial Sequence:  siNA antisense region
aaacaagaguaacuuauug

SEQ ID NO: 1871 - RNA, 19 nt, Artificial Sequence
  Description of Artificial Sequence:  siNA antisense region
cuuaccauugauaucagca

SEQ ID NO: 1872 - RNA, 19 nt, Artificial Sequence
  Description of Artificial Sequence:  siNA antisense region
cugagaaucaugguaaagc

SEQ ID NO: 1873 - RNA, 19 nt, Artificial Sequence
  Description of Artificial Sequence:  siNA antisense region
uucaccucuaagcauguuc

SEQ ID NO: 1874 - RNA, 19 nt, Artificial Sequence
  Description of Artificial Sequence:  siNA antisense region
cucaaggaaagacauaucu

SEQ ID NO: 1875 - RNA, 19 nt, Artificial Sequence
  Description of Artificial Sequence:  siNA antisense region
cauguaaggugcauccuuc

SEQ ID NO: 1876 - RNA, 19 nt, Artificial Sequence
  Description of Artificial Sequence:  siNA antisense region
agugauaacaucaccuacc

SEQ ID NO: 1877 - RNA, 19 nt, Artificial Sequence
  Description of Artificial Sequence:  siNA antisense region
acaagugauaucaccacua

SEQ ID NO: 1878 - RNA, 19 nt, Artificial Sequence
  Description of Artificial Sequence:  siNA antisense region
uuuggaggguauuacaaca

SEQ ID NO: 1879 - RNA, 19 nt, Artificial Sequence
  Description of Artificial Sequence:  siNA antisense region
aguagugccaccagccuuu

SEQ ID NO: 1880 - RNA, 19 nt, Artificial Sequence
  Description of Artificial Sequence:  siNA antisense region
agcucuugagagcaucuca

SEQ ID NO: 1881 - RNA, 19 nt, Artificial Sequence
  Description of Artificial Sequence:  siNA antisense region
aacuggcacuuucuucaaa

SEQ ID NO: 1882 - RNA, 19 nt, Artificial Sequence
  Description of Artificial Sequence:  siNA antisense region
cgugguuauauacucauca

SEQ ID NO: 1883 - RNA, 19 nt, Artificial Sequence
  Description of Artificial Sequence:  siNA antisense region
acauccuuguccaggguac

SEQ ID NO: 1884 - RNA, 19 nt, Artificial Sequence
  Description of Artificial Sequence:  siNA antisense region
cucaaguguauaaccagca

SEQ ID NO: 1885 - RNA, 19 nt, Artificial Sequence
  Description of Artificial Sequence:  siNA antisense region
aagagcagucuuagcuucc

SEQ ID NO: 1886 - RNA, 19 nt, Artificial Sequence
  Description of Artificial Sequence:  siNA antisense region
ugcagauuugcauuucuua

SEQ ID NO: 1887 - RNA, 19 nt, Artificial Sequence
  Description of Artificial Sequence:  siNA antisense region
ugaagguaguacauaaaau

SEQ ID NO: 1888 - RNA, 19 nt, Artificial Sequence
  Description of Artificial Sequence:  siNA antisense region
cuuagcauuaggugcuucu

SEQ ID NO: 1889 - RNA, 19 nt, Artificial Sequence
  Description of Artificial Sequence:  siNA antisense region
aguuccuagaaucucuucc

SEQ ID NO: 1890 - RNA, 19 nt, Artificial Sequence
  Description of Artificial Sequence:  siNA antisense region
ucucaaauuccaggauaca

SEQ ID NO: 1891 - RNA, 19 nt, Artificial Sequence
  Description of Artificial Sequence:  siNA antisense region
agcaugagcaagcauuucu

SEQ ID NO: 1892 - RNA, 19 nt, Artificial Sequence
  Description of Artificial Sequence:  siNA antisense region
uaauuuucuugucucuuca

SEQ ID NO: 1893 - RNA, 19 nt, Artificial Sequence
  Description of Artificial Sequence:  siNA antisense region
auccaugcauauaggcauu

SEQ ID NO: 1894 - RNA, 19 nt, Artificial Sequence
  Description of Artificial Sequence:  siNA antisense region
ugccauuauggcucuaaca

SEQ ID NO: 1895 - RNA, 19 nt, Artificial Sequence
  Description of Artificial Sequence:  siNA antisense region
auacuuacguuggaugguu

SEQ ID NO: 1896 - RNA, 19 nt, Artificial Sequence
  Description of Artificial Sequence:  siNA antisense region
uugaauuuuaauuccuuua

SEQ ID NO: 1897 - RNA, 19 nt, Artificial Sequence
  Description of Artificial Sequence:  siNA antisense region
auagucaacgaugcccucu

SEQ ID NO: 1898 - RNA, 19 nt, Artificial Sequence
  Description of Artificial Sequence:  siNA antisense region
aaagaagaaucggacacca

SEQ ID NO: 1899 - RNA, 19 nt, Artificial Sequence
  Description of Artificial Sequence:  siNA antisense region
aggcucuuuacuaguauaa

SEQ ID NO: 1900 - RNA, 19 nt, Artificial Sequence
  Description of Artificial Sequence:  siNA antisense region
cguaauaauagaagcuaca

SEQ ID NO: 1901 - RNA, 19 nt, Artificial Sequence
  Description of Artificial Sequence:  siNA antisense region
auuuagagaguucagcuuc

SEQ ID NO: 1902 - RNA, 19 nt, Artificial Sequence
  Description of Artificial Sequence:  siNA antisense region
cauugugacaagcggcuca

SEQ ID NO: 1903 - RNA, 19 nt, Artificial Sequence
  Description of Artificial Sequence:  siNA antisense region
ugucacauaaccaauuggc

SEQ ID NO: 1904 - RNA, 19 nt, Artificial Sequence
  Description of Artificial Sequence:  siNA antisense region
uucaagauuaaaaccaugu

SEQ ID NO: 1905 - RNA, 19 nt, Artificial Sequence
  Description of Artificial Sequence:  siNA antisense region
cauacagcgcgcagccucu

SEQ ID NO: 1906 - RNA, 19 nt, Artificial Sequence
  Description of Artificial Sequence:  siNA antisense region
aggagcuuuaagagaacgc

SEQ ID NO: 1907 - RNA, 19 nt, Artificial Sequence
  Description of Artificial Sequence:  siNA antisense region
ugauacugacacuacggca

SEQ ID NO: 1908 - RNA, 19 nt, Artificial Sequence
  Description of Artificial Sequence:  siNA antisense region
aguaacagcaucuggugau

SEQ ID NO: 1909 - RNA, 19 nt, Artificial Sequence
  Description of Artificial Sequence:  siNA antisense region
gagguauccauuauaugua

SEQ ID NO: 1910 - RNA, 19 nt, Artificial Sequence
  Description of Artificial Sequence:  siNA antisense region
ugucuuugaugacgaagug

SEQ ID NO: 1911 - RNA, 19 nt, Artificial Sequence
  Description of Artificial Sequence:  siNA antisense region
uacaaagugcuccucagau

SEQ ID NO: 1912 - RNA, 19 nt, Artificial Sequence
  Description of Artificial Sequence:  siNA antisense region
agccaaagaaacuguuucu

SEQ ID NO: 1913 - RNA, 19 nt, Artificial Sequence
  Description of Artificial Sequence:  siNA antisense region
ccaaucucuguaagagcca

SEQ ID NO: 1914 - RNA, 19 nt, Artificial Sequence
  Description of Artificial Sequence:  siNA antisense region
acgcuguccugaauaggac

SEQ ID NO: 1915 - RNA, 19 nt, Artificial Sequence
  Description of Artificial Sequence:  siNA antisense region
uucaacaccuaacucugua

SEQ ID NO: 1916 - RNA, 19 nt, Artificial Sequence
  Description of Artificial Sequence:  siNA antisense region
gucaccacgcuuaagaaau

SEQ ID NO: 1917 - RNA, 19 nt, Artificial Sequence
  Description of Artificial Sequence:  siNA antisense region
agugugguacacaauuuug

SEQ ID NO: 1918 - RNA, 19 nt, Artificial Sequence
  Description of Artificial Sequence:  siNA antisense region
cucgacggggcucuccaga

SEQ ID NO: 1919 - RNA, 19 nt, Artificial Sequence
  Description of Artificial Sequence:  siNA antisense region
cucaccgucaagaugaaac

SEQ ID NO: 1920 - RNA, 19 nt, Artificial Sequence
  Description of Artificial Sequence:  siNA antisense region
uuugucaagugaaagaacc

SEQ ID NO: 1921 - RNA, 19 nt, Artificial Sequence
  Description of Artificial Sequence:  siNA antisense region
ggauaagagacucuuuagu

SEQ ID NO: 1922 - RNA, 19 nt, Artificial Sequence
  Description of Artificial Sequence:  siNA antisense region
agucuuaaccucccgcagg

SEQ ID NO: 1923 - RNA, 19 nt, Artificial Sequence
  Description of Artificial Sequence:  siNA antisense region
aguugugaacacuuuuaua

SEQ ID NO: 1924 - RNA, 19 nt, Artificial Sequence
  Description of Artificial Sequence:  siNA antisense region
gagauuaguguuguccaca

SEQ ID NO: 1925 - RNA, 19 nt, Artificial Sequence
  Description of Artificial Sequence:  siNA antisense region
auccacaagcugugugugg

SEQ ID NO: 1926 - RNA, 19 nt, Artificial Sequence
  Description of Artificial Sequence:  siNA antisense region
uccauaugucauagacaua

SEQ ID NO: 1927 - RNA, 19 nt, Artificial Sequence
  Description of Artificial Sequence:  siNA antisense region
uguuggaccaaacugcugu

SEQ ID NO: 1928 - RNA, 19 nt, Artificial Sequence
  Description of Artificial Sequence:  siNA antisense region
aucagcaccauccaaguau

SEQ ID NO: 1929 - RNA, 19 nt, Artificial Sequence
  Description of Artificial Sequence:  siNA antisense region
agguuuaauuuuuguaaca

SEQ ID NO: 1930 - RNA, 19 nt, Artificial Sequence
  Description of Artificial Sequence:  siNA antisense region
acccucaugauuuacauga

SEQ ID NO: 1931 - RNA, 19 nt, Artificial Sequence
  Description of Artificial Sequence:  siNA antisense region
uaguacaaagaaagucuua

SEQ ID NO: 1932 - RNA, 19 nt, Artificial Sequence
  Description of Artificial Sequence:  siNA antisense region
uagugugucaucacuaggu

SEQ ID NO: 1933 - RNA, 19 nt, Artificial Sequence
  Description of Artificial Sequence:  siNA antisense region
cucgaaagcuucacuacgu

SEQ ID NO: 1934 - RNA, 19 nt, Artificial Sequence
  Description of Artificial Sequence:  siNA antisense region
aucaagaguaugguaguac

SEQ ID NO: 1935 - RNA, 19 nt, Artificial Sequence
  Description of Artificial Sequence:  siNA antisense region
ccuaccaagaaaacucuca

SEQ ID NO: 1936 - RNA, 19 nt, Artificial Sequence
  Description of Artificial Sequence:  siNA antisense region
guuuaaagcagacauguac

SEQ ID NO: 1937 - RNA, 19 nt, Artificial Sequence
  Description of Artificial Sequence:  siNA antisense region
uuuccauuucuuugugugg

SEQ ID NO: 1938 - RNA, 19 nt, Artificial Sequence
  Description of Artificial Sequence:  siNA antisense region
accaccaacuugaggaaau

SEQ ID NO: 1939 - RNA, 19 nt, Artificial Sequence
  Description of Artificial Sequence:  siNA antisense region
ccauuuaauugaaguuaaa

SEQ ID NO: 1940 - RNA, 19 nt, Artificial Sequence
  Description of Artificial Sequence:  siNA antisense region
auaacaauuguuaucagcc

SEQ ID NO: 1941 - RNA, 19 nt, Artificial Sequence
  Description of Artificial Sequence:  siNA antisense region
uaauaaaacacuagacaaa

SEQ ID NO: 1942 - RNA, 19 nt, Artificial Sequence
  Description of Artificial Sequence:  siNA antisense region
uucaagcuguugaagugcu

SEQ ID NO: 1943 - RNA, 19 nt, Artificial Sequence
  Description of Artificial Sequence:  siNA antisense region
uggugcauugaauuugacu

SEQ ID NO: 1944 - RNA, 19 nt, Artificial Sequence
  Description of Artificial Sequence:  siNA antisense region
auaagccucuugaagugcu

SEQ ID NO: 1945 - RNA, 19 nt, Artificial Sequence
  Description of Artificial Sequence:  siNA antisense region
accagcacgggcucuauaa

SEQ ID NO: 1946 - RNA, 19 nt, Artificial Sequence
  Description of Artificial Sequence:  siNA antisense region
acaaaaguuagcagcauca

SEQ ID NO: 1947 - RNA, 19 nt, Artificial Sequence
  Description of Artificial Sequence:  siNA antisense region
guaagcgaguaugagugca

SEQ ID NO: 1948 - RNA, 19 nt, Artificial Sequence
  Description of Artificial Sequence:  siNA antisense region
gccaacaguuuuauuacug

SEQ ID NO: 1949 - RNA, 19 nt, Artificial Sequence
  Description of Artificial Sequence:  siNA antisense region
ucugacaucaccaagcucg

SEQ ID NO: 1950 - RNA, 19 nt, Artificial Sequence
  Description of Artificial Sequence:  siNA antisense region
aagaugggucauaguuucu

SEQ ID NO: 1951 - RNA, 19 nt, Artificial Sequence
  Description of Artificial Sequence:  siNA antisense region
caaauuagcaugcuguaga

SEQ ID NO: 1952 - RNA, 19 nt, Artificial Sequence
  Description of Artificial Sequence:  siNA antisense region
aacucgcuuugcagauucc

SEQ ID NO: 1953 - RNA, 19 nt, Artificial Sequence
  Description of Artificial Sequence:  siNA antisense region
uuuacacaccacauuaaga

SEQ ID NO: 1954 - RNA, 19 nt, Artificial Sequence
  Description of Artificial Sequence:  siNA antisense region
aguuuucugaccacaaugu

SEQ ID NO: 1955 - RNA, 19 nt, Artificial Sequence
  Description of Artificial Sequence:  siNA antisense region
uacacccguuaagguagua

SEQ ID NO: 1956 - RNA, 19 nt, Artificial Sequence
  Description of Artificial Sequence:  siNA antisense region
cauauacaucacagcuucu

SEQ ID NO: 1957 - RNA, 19 nt, Artificial Sequence
  Description of Artificial Sequence:  siNA antisense region
aucauaagauagaguaccc

SEQ ID NO: 1958 - RNA, 19 nt, Artificial Sequence
  Description of Artificial Sequence:  siNA antisense region
aacaccugucuuaagauua

SEQ ID NO: 1959 - RNA, 19 nt, Artificial Sequence
  Description of Artificial Sequence:  siNA antisense region
acacacacauggaauggaa

SEQ ID NO: 1960 - RNA, 19 nt, Artificial Sequence
  Description of Artificial Sequence:  siNA antisense region
uuguguagcaucacgacca

SEQ ID NO: 1961 - RNA, 19 nt, Artificial Sequence
  Description of Artificial Sequence:  siNA antisense region
cucuuguuguacuagauau

SEQ ID NO: 1962 - RNA, 19 nt, Artificial Sequence
  Description of Artificial Sequence:  siNA antisense region
caucauaacaaaagaagac

SEQ ID NO: 1963 - RNA, 19 nt, Artificial Sequence
  Description of Artificial Sequence:  siNA antisense region
cucagcagguggugcagac

SEQ ID NO: 1964 - RNA, 19 nt, Artificial Sequence
  Description of Artificial Sequence:  siNA antisense region
accuugcuguaauuuauac

SEQ ID NO: 1965 - RNA, 19 nt, Artificial Sequence
  Description of Artificial Sequence:  siNA antisense region
auucgcacauaagaaugua

SEQ ID NO: 1966 - RNA, 19 nt, Artificial Sequence
  Description of Artificial Sequence:  siNA antisense region
auaguuaccaguguacuca

SEQ ID NO: 1967 - RNA, 19 nt, Artificial Sequence
  Description of Artificial Sequence:  siNA antisense region
aguguaaugaccacacuga

SEQ ID NO: 1968 - RNA, 19 nt, Artificial Sequence
  Description of Artificial Sequence:  siNA antisense region
cuccuuagcaguuauauga

SEQ ID NO: 1969 - RNA, 19 nt, Artificial Sequence
  Description of Artificial Sequence:  siNA antisense region
gucaauacgauagaggguc

SEQ ID NO: 1970 - RNA, 19 nt, Artificial Sequence
  Description of Artificial Sequence:  siNA antisense region
cuuuguaaggugagcuccg

SEQ ID NO: 1971 - RNA, 19 nt, Artificial Sequence
  Description of Artificial Sequence:  siNA antisense region
uccuuuguacucugacauc

SEQ ID NO: 1972 - RNA, 19 nt, Artificial Sequence
  Description of Artificial Sequence:  siNA antisense region
gaaaacaucagucacuggu

SEQ ID NO: 1973 - RNA, 19 nt, Artificial Sequence
  Description of Artificial Sequence:  siNA antisense region
guaagauguuuccuuguag

SEQ ID NO: 1974 - RNA, 19 nt, Artificial Sequence
  Description of Artificial Sequence:  siNA antisense region
aggcuugaugguuguagug

SEQ ID NO: 1975 - RNA, 19 nt, Artificial Sequence
  Description of Artificial Sequence:  siNA antisense region
aucgaguuuauacgacaca

SEQ ID NO: 1976 - RNA, 19 nt, Artificial Sequence
  Description of Artificial Sequence:  siNA antisense region
cucuguguaaguaacucca

SEQ ID NO: 1977 - RNA, 19 nt, Artificial Sequence
  Description of Artificial Sequence:  siNA antisense region
auccaauuuugguucaauc

SEQ ID NO: 1978 - RNA, 19 nt, Artificial Sequence
  Description of Artificial Sequence:  siNA antisense region
auccuuuuuauaauaccca

SEQ ID NO: 1979 - RNA, 19 nt, Artificial Sequence
  Description of Artificial Sequence:  siNA antisense region
cucuguauaguaagcauua

SEQ ID NO: 1980 - RNA, 19 nt, Artificial Sequence
  Description of Artificial Sequence:  siNA antisense region
uacaaggucuauaggcugc

SEQ ID NO: 1981 - RNA, 19 nt, Artificial Sequence
  Description of Artificial Sequence:  siNA antisense region
ugguaaugguugaguuggu

SEQ ID NO: 1982 - RNA, 19 nt, Artificial Sequence
  Description of Artificial Sequence:  siNA antisense region
auuaucaaaacucgcauuu

SEQ ID NO: 1983 - RNA, 19 nt, Artificial Sequence
  Description of Artificial Sequence:  siNA antisense region
agaacaugugaguuugaaa

SEQ ID NO: 1984 - RNA, 19 nt, Artificial Sequence
  Description of Artificial Sequence:  siNA antisense region
aucagcaaauuuuguguua

SEQ ID NO: 1985 - RNA, 19 nt, Artificial Sequence
  Description of Artificial Sequence:  siNA antisense region
ugucauuugauuuaaauca

SEQ ID NO: 1986 - RNA, 19 nt, Artificial Sequence
  Description of Artificial Sequence:  siNA antisense region
agcuggcuuugugaagccu

SEQ ID NO: 1987 - RNA, 19 nt, Artificial Sequence
  Description of Artificial Sequence:  siNA antisense region
gacagauagcucucgugaa

SEQ ID NO: 1988 - RNA, 19 nt, Artificial Sequence
  Description of Artificial Sequence:  siNA antisense region
caagucugggaagaaugug

SEQ ID NO: 1989 - RNA, 19 nt, Artificial Sequence
  Description of Artificial Sequence:  siNA antisense region
agccacuacaucgccauuc

SEQ ID NO: 1990 - RNA, 19 nt, Artificial Sequence
  Description of Artificial Sequence:  siNA antisense region
auagugucuauagucaaua

SEQ ID NO: 1991 - RNA, 19 nt, Artificial Sequence
  Description of Artificial Sequence:  siNA antisense region
uuucuugaaacucgcugaa

SEQ ID NO: 1992 - RNA, 19 nt, Artificial Sequence
  Description of Artificial Sequence:  siNA antisense region
augcaguaauuuagcaccu

SEQ ID NO: 1993 - RNA, 19 nt, Artificial Sequence
  Description of Artificial Sequence:  siNA antisense region
gugccaaacaauuggcuua

SEQ ID NO: 1994 - RNA, 19 nt, Artificial Sequence
  Description of Artificial Sequence:  siNA antisense region
gguuguagccugguuaaug

SEQ ID NO: 1995 - RNA, 19 nt, Artificial Sequence
  Description of Artificial Sequence:  siNA antisense region
ugguuugaacguugucuug

SEQ ID NO: 1996 - RNA, 19 nt, Artificial Sequence
  Description of Artificial Sequence:  siNA antisense region
acguaaacaccaaguguuu

SEQ ID NO: 1997 - RNA, 19 nt, Artificial Sequence
  Description of Artificial Sequence:  siNA antisense region
cuuuguacuccaaagacaa

SEQ ID NO: 1998 - RNA, 19 nt, Artificial Sequence
  Description of Artificial Sequence:  siNA antisense region
auuugaaguaucuacuggc

SEQ ID NO: 1999 - RNA, 19 nt, Artificial Sequence
  Description of Artificial Sequence:  siNA antisense region
ugccagaacuucaaaugaa

SEQ ID NO: 2000 - RNA, 19 nt, Artificial Sequence
  Description of Artificial Sequence:  siNA antisense region
uccuugugugucuucuacu

SEQ ID NO: 2001 - RNA, 19 nt, Artificial Sequence
  Description of Artificial Sequence:  siNA antisense region
acaagcaagauuguccauu

SEQ ID NO: 2002 - RNA, 19 nt, Artificial Sequence
  Description of Artificial Sequence:  siNA antisense region
gguggguuguugacuuuca

SEQ ID NO: 2003 - RNA, 19 nt, Artificial Sequence
  Description of Artificial Sequence:  siNA antisense region
uuccacuacuucuucagag

SEQ ID NO: 2004 - RNA, 19 nt, Artificial Sequence
  Description of Artificial Sequence:  siNA antisense region
cuucuguaugguaggauuu

SEQ ID NO: 2005 - RNA, 19 nt, Artificial Sequence
  Description of Artificial Sequence:  siNA antisense region
gucacacucuaugacuucc

SEQ ID NO: 2006 - RNA, 19 nt, Artificial Sequence
  Description of Artificial Sequence:  siNA antisense region
aacuucgguaguuuucacg

SEQ ID NO: 2007 - RNA, 19 nt, Artificial Sequence
  Description of Artificial Sequence:  siNA antisense region
aaguaugacauugccuaca

SEQ ID NO: 2008 - RNA, 19 nt, Artificial Sequence
  Description of Artificial Sequence:  siNA antisense region
accuucaucugaugguuua

SEQ ID NO: 2009 - RNA, 19 nt, Artificial Sequence
  Description of Artificial Sequence:  siNA antisense region
cucuuguguuacuuuaaca

SEQ ID NO: 2010 - RNA, 19 nt, Artificial Sequence
  Description of Artificial Sequence:  siNA antisense region
aagauccucaugaccuaac

SEQ ID NO: 2011 - RNA, 19 nt, Artificial Sequence
  Description of Artificial Sequence:  siNA antisense region
uuccacauaagcagccaua

SEQ ID NO: 2012 - RNA, 19 nt, Artificial Sequence
  Description of Artificial Sequence:  siNA antisense region
aaugguaaugcuuguguuu

SEQ ID NO: 2013 - RNA, 19 nt, Artificial Sequence
  Description of Artificial Sequence:  siNA antisense region
aagcucauuagguuucuua

SEQ ID NO: 2014 - RNA, 19 nt, Artificial Sequence
  Description of Artificial Sequence:  siNA antisense region
uaaaccuaaggcuagugaa

SEQ ID NO: 2015 - RNA, 19 nt, Artificial Sequence
  Description of Artificial Sequence:  siNA antisense region
augaguggcaauuguuuuu

SEQ ID NO: 2016 - RNA, 19 nt, Artificial Sequence
  Description of Artificial Sequence:  siNA antisense region
auuaauugcagcaauacca

SEQ ID NO: 2017 - RNA, 19 nt, Artificial Sequence
  Description of Artificial Sequence:  siNA antisense region
uuuacuccaaggaacacua

SEQ ID NO: 2018 - RNA, 19 nt, Artificial Sequence
  Description of Artificial Sequence:  siNA antisense region
uuugacauaagccaaaauu

SEQ ID NO: 2019 - RNA, 19 nt, Artificial Sequence
  Description of Artificial Sequence:  siNA antisense region
ugcuuguccuaagaauggu

SEQ ID NO: 2020 - RNA, 19 nt, Artificial Sequence
  Description of Artificial Sequence:  siNA antisense region
auuugauguuguaauugcu

SEQ ID NO: 2021 - RNA, 19 nt, Artificial Sequence
  Description of Artificial Sequence:  siNA antisense region
ugcuaaucucuuagcgcaa

SEQ ID NO: 2022 - RNA, 19 nt, Artificial Sequence
  Description of Artificial Sequence:  siNA antisense region
auuguuaaacacacguugu

SEQ ID NO: 2023 - RNA, 19 nt, Artificial Sequence
  Description of Artificial Sequence:  siNA antisense region
aaacacauaaggcauauaa

SEQ ID NO: 2024 - RNA, 19 nt, Artificial Sequence
  Description of Artificial Sequence:  siNA antisense region
caauuggaacaauaaugua

SEQ ID NO: 2025 - RNA, 19 nt, Artificial Sequence
  Description of Artificial Sequence:  siNA antisense region
acuuuuaguaaaaguacac

SEQ ID NO: 2026 - RNA, 19 nt, Artificial Sequence
  Description of Artificial Sequence:  siNA antisense region
ucuaauucuagaauuggua

SEQ ID NO: 2027 - RNA, 19 nt, Artificial Sequence
  Description of Artificial Sequence:  siNA antisense region
aguuguagguagugaagcu

SEQ ID NO: 2028 - RNA, 19 nt, Artificial Sequence
  Description of Artificial Sequence:  siNA antisense region
aacacuauuuuuagcaaua

SEQ ID NO: 2029 - RNA, 19 nt, Artificial Sequence
  Description of Artificial Sequence:  siNA antisense region
uaauuuagcaacacucuua

SEQ ID NO: 2030 - RNA, 19 nt, Artificial Sequence
  Description of Artificial Sequence:  siNA antisense region
aaugccggcauccaaacau

SEQ ID NO: 2031 - RNA, 19 nt, Artificial Sequence
  Description of Artificial Sequence:  siNA antisense region
gggugacuucacauaauua

SEQ ID NO: 2032 - RNA, 19 nt, Artificial Sequence
  Description of Artificial Sequence:  siNA antisense region
gaacaauuuagaaaauuug

SEQ ID NO: 2033 - RNA, 19 nt, Artificial Sequence
  Description of Artificial Sequence:  siNA antisense region
uagccacauagcgauugug

SEQ ID NO: 2034 - RNA, 19 nt, Artificial Sequence
  Description of Artificial Sequence:  siNA antisense region
gcaaauacuuaacaacaau

SEQ ID NO: 2035 - RNA, 19 nt, Artificial Sequence
  Description of Artificial Sequence:  siNA antisense region
acagauuagagaaccuaag

SEQ ID NO: 2036 - RNA, 19 nt, Artificial Sequence
  Description of Artificial Sequence:  siNA antisense region
accaaaagcagcaguuaca

SEQ ID NO: 2037 - RNA, 19 nt, Artificial Sequence
  Description of Artificial Sequence:  siNA antisense region
aaaauuagauaagaguaca

SEQ ID NO: 2038 - RNA, 19 nt, Artificial Sequence
  Description of Artificial Sequence:  siNA antisense region
acaauaagaaggagcacca

SEQ ID NO: 2039 - RNA, 19 nt, Artificial Sequence
  Description of Artificial Sequence:  siNA antisense region
caauucucuaacgccauua

SEQ ID NO: 2040 - RNA, 19 nt, Artificial Sequence
  Description of Artificial Sequence:  siNA antisense region
guuagacgaauuaagauac

SEQ ID NO: 2041 - RNA, 19 nt, Artificial Sequence
  Description of Artificial Sequence:  siNA antisense region
gaaauccauaguaguaacg

SEQ ID NO: 2042 - RNA, 19 nt, Artificial Sequence
  Description of Artificial Sequence:  siNA antisense region
aggaaaagaaccuucacag

SEQ ID NO: 2043 - RNA, 19 nt, Artificial Sequence
  Description of Artificial Sequence:  siNA antisense region
acuuaaacaaaugcugcaa

SEQ ID NO: 2044 - RNA, 19 nt, Artificial Sequence
  Description of Artificial Sequence:  siNA antisense region
aucaagggagucuaaucca

SEQ ID NO: 2045 - RNA, 19 nt, Artificial Sequence
  Description of Artificial Sequence:  siNA antisense region
uucaagagcuggauaagaa

SEQ ID NO: 2046 - RNA, 19 nt, Artificial Sequence
  Description of Artificial Sequence:  siNA antisense region
aaucgucaccugaaugguu

SEQ ID NO: 2047 - RNA, 19 nt, Artificial Sequence
  Description of Artificial Sequence:  siNA antisense region
gucuagcuuguacgaugaa

SEQ ID NO: 2048 - RNA, 19 nt, Artificial Sequence
  Description of Artificial Sequence:  siNA antisense region
cagaccuaaaauugucaag

SEQ ID NO: 2049 - RNA, 19 nt, Artificial Sequence
  Description of Artificial Sequence:  siNA antisense region
caaaacccacucagcggcc

SEQ ID NO: 2050 - RNA, 19 nt, Artificial Sequence
  Description of Artificial Sequence:  siNA antisense region
ugugaacaacauauaugcc

SEQ ID NO: 2051 - RNA, 19 nt, Artificial Sequence
  Description of Artificial Sequence:  siNA antisense region
uaauaaauaaaagaauuuu

SEQ ID NO: 2052 - RNA, 19 nt, Artificial Sequence
  Description of Artificial Sequence:  siNA antisense region
cauuauagcugaaagaccu

SEQ ID NO: 2053 - RNA, 19 nt, Artificial Sequence
  Description of Artificial Sequence:  siNA antisense region
auagccaaagaacaccugc

SEQ ID NO: 2054 - RNA, 19 nt, Artificial Sequence
  Description of Artificial Sequence:  siNA antisense region
gaugaaaugacuagcaaaa

SEQ ID NO: 2055 - RNA, 19 nt, Artificial Sequence
  Description of Artificial Sequence:  siNA antisense region
caugagccaagaauugcug

SEQ ID NO: 2056 - RNA, 19 nt, Artificial Sequence
  Description of Artificial Sequence:  siNA antisense region
aauacuaaugauaaaccac

SEQ ID NO: 2057 - RNA, 19 nt, Artificial Sequence
  Description of Artificial Sequence:  siNA antisense region
aacgggugccauuuguaca

SEQ ID NO: 2058 - RNA, 19 nt, Artificial Sequence
  Description of Artificial Sequence:  siNA antisense region
cauccuaaccauugcagaa

SEQ ID NO: 2059 - RNA, 19 nt, Artificial Sequence
  Description of Artificial Sequence:  siNA antisense region
agaagcaaagaagauguac

SEQ ID NO: 2060 - RNA, 19 nt, Artificial Sequence
  Description of Artificial Sequence:  siNA antisense region
cuuccauauguaguagaaa

SEQ ID NO: 2061 - RNA, 19 nt, Artificial Sequence
  Description of Artificial Sequence:  siNA antisense region
caugauaugaacauagcuc

SEQ ID NO: 2062 - RNA, 19 nt, Artificial Sequence
  Description of Artificial Sequence:  siNA antisense region
cgaagaggugcaaccaucc

SEQ ID NO: 2063 - RNA, 19 nt, Artificial Sequence
  Description of Artificial Sequence:  siNA antisense region
auagcacaucaugcaaguc

SEQ ID NO: 2064 - RNA, 19 nt, Artificial Sequence
  Description of Artificial Sequence:  siNA antisense region
uguggcacgauugcgcuua

SEQ ID NO: 2065 - RNA, 19 nt, Artificial Sequence
  Description of Artificial Sequence:  siNA antisense region
aguuguacacucaacgcgu

SEQ ID NO: 2066 - RNA, 19 nt, Artificial Sequence
  Description of Artificial Sequence:  siNA antisense region
cuucaugccauuaacaaua

SEQ ID NO: 2067 - RNA, 19 nt, Artificial Sequence
  Description of Artificial Sequence:  siNA antisense region
auagacauagaaagaucuc

SEQ ID NO: 2068 - RNA, 19 nt, Artificial Sequence
  Description of Artificial Sequence:  siNA antisense region
gccacggccuccauuugca

SEQ ID NO: 2069 - RNA, 19 nt, Artificial Sequence
  Description of Artificial Sequence:  siNA antisense region
auugugagucuugcagaag

SEQ ID NO: 2070 - RNA, 19 nt, Artificial Sequence
  Description of Artificial Sequence:  siNA antisense region
acaauugagacaauuccaa

SEQ ID NO: 2071 - RNA, 19 nt, Artificial Sequence
  Description of Artificial Sequence:  siNA antisense region
accagugcaaaauguguca

SEQ ID NO: 2072 - RNA, 19 nt, Artificial Sequence
  Description of Artificial Sequence:  siNA antisense region
aucacuaaugaauguacua

SEQ ID NO: 2073 - RNA, 19 nt, Artificial Sequence
  Description of Artificial Sequence:  siNA antisense region
caaaucacgagcaacuuca

SEQ ID NO: 2074 - RNA, 19 nt, Artificial Sequence
  Description of Artificial Sequence:  siNA antisense region
ucuuuuaaacuggagugac

SEQ ID NO: 2075 - RNA, 19 nt, Artificial Sequence
  Description of Artificial Sequence:  siNA antisense region
gucaguaggguugauuggu

SEQ ID NO: 2076 - RNA, 19 nt, Artificial Sequence
  Description of Artificial Sequence:  siNA antisense region
aacaauauacgaugacugg

SEQ ID NO: 2077 - RNA, 19 nt, Artificial Sequence
  Description of Artificial Sequence:  siNA antisense region
uuucacagcaacacuauca

SEQ ID NO: 2078 - RNA, 19 nt, Artificial Sequence
  Description of Artificial Sequence:  siNA antisense region
gaggugaagcgcgccauuu

SEQ ID NO: 2079 - RNA, 19 nt, Artificial Sequence
  Description of Artificial Sequence:  siNA antisense region
accagccuugucaaaguag

SEQ ID NO: 2080 - RNA, 19 nt, Artificial Sequence
  Description of Artificial Sequence:  siNA antisense region
ucucucauaggucuuuuga

SEQ ID NO: 2081 - RNA, 19 nt, Artificial Sequence
  Description of Artificial Sequence:  siNA antisense region
aaaaugggagagcggaugu

SEQ ID NO: 2082 - RNA, 19 nt, Artificial Sequence
  Description of Artificial Sequence:  siNA antisense region
caaauugucuaaauugaca

SEQ ID NO: 2083 - RNA, 19 nt, Artificial Sequence
  Description of Artificial Sequence:  siNA antisense region
uuuaguguuguuagcucuc

SEQ ID NO: 2084 - RNA, 19 nt, Artificial Sequence
  Description of Artificial Sequence:  siNA antisense region
auuaauaggcagugaaccu

SEQ ID NO: 2085 - RNA, 19 nt, Artificial Sequence
  Description of Artificial Sequence:  siNA antisense region
gccaucaaaaacuaugaca

SEQ ID NO: 2086 - RNA, 19 nt, Artificial Sequence
  Description of Artificial Sequence:  siNA antisense region
cucgucgcauuuggacuug

SEQ ID NO: 2087 - RNA, 19 nt, Artificial Sequence
  Description of Artificial Sequence:  siNA antisense region
agcagacuuagaagcagac

SEQ ID NO: 2088 - RNA, 19 nt, Artificial Sequence
  Description of Artificial Sequence:  siNA antisense region
cugacuguaguacacagaa

SEQ ID NO: 2089 - RNA, 19 nt, Artificial Sequence
  Description of Artificial Sequence:  siNA antisense region
aauagguuggcacaucagc

SEQ ID NO: 2090 - RNA, 19 nt, Artificial Sequence
  Description of Artificial Sequence:  siNA antisense region
agcuuggucaagcaacaga

SEQ ID NO: 2091 - RNA, 19 nt, Artificial Sequence
  Description of Artificial Sequence:  siNA antisense region
uccaacgucugauacaaga

SEQ ID NO: 2092 - RNA, 19 nt, Artificial Sequence
  Description of Artificial Sequence:  siNA antisense region
ggaaacuucaguacuaucu

SEQ ID NO: 2093 - RNA, 19 nt, Artificial Sequence
  Description of Artificial Sequence:  siNA antisense region
agcaucaaacaucuuaacg

SEQ ID NO: 2094 - RNA, 19 nt, Artificial Sequence
  Description of Artificial Sequence:  siNA antisense region
ugaaaaggugucgacauaa

SEQ ID NO: 2095 - RNA, 19 nt, Artificial Sequence
  Description of Artificial Sequence:  siNA antisense region
aggaacacuaaaaguugcu

SEQ ID NO: 2096 - RNA, 19 nt, Artificial Sequence
  Description of Artificial Sequence:  siNA antisense region
ugccuuaaguuuuuccaua

SEQ ID NO: 2097 - RNA, 19 nt, Artificial Sequence
  Description of Artificial Sequence:  siNA antisense region
gugagcuguagcaacaagu

SEQ ID NO: 2098 - RNA, 19 nt, Artificial Sequence
  Description of Artificial Sequence:  siNA antisense region
acccuuugcuaacucgcug

SEQ ID NO: 2099 - RNA, 19 nt, Artificial Sequence
  Description of Artificial Sequence:  siNA antisense region
gacaccaucuaaagcuaca

SEQ ID NO: 2100 - RNA, 19 nt, Artificial Sequence
  Description of Artificial Sequence:  siNA antisense region
ugacacgaauguagaaagg

SEQ ID NO: 2101 - RNA, 19 nt, Artificial Sequence
  Description of Artificial Sequence:  siNA antisense region
aacaccuugucgggcagcu

SEQ ID NO: 2102 - RNA, 19 nt, Artificial Sequence
  Description of Artificial Sequence:  siNA antisense region
gucaacaucgguaucaaca

SEQ ID NO: 2103 - RNA, 19 nt, Artificial Sequence
  Description of Artificial Sequence:  siNA antisense region
uucaauaacauccuuugug

SEQ ID NO: 2104 - RNA, 19 nt, Artificial Sequence
  Description of Artificial Sequence:  siNA antisense region
augugaaaguuugagacau

SEQ ID NO: 2105 - RNA, 19 nt, Artificial Sequence
  Description of Artificial Sequence:  siNA antisense region
cacuucuaagucagaguga

SEQ ID NO: 2106 - RNA, 19 nt, Artificial Sequence
  Description of Artificial Sequence:  siNA antisense region
guuacaacugucaccuguc

SEQ ID NO: 2107 - RNA, 19 nt, Artificial Sequence
  Description of Artificial Sequence:  siNA antisense region
auaggugagcaugaaauug

SEQ ID NO: 2108 - RNA, 19 nt, Artificial Sequence
  Description of Artificial Sequence:  siNA antisense region
cauguuuucaaccuuauua

SEQ ID NO: 2109 - RNA, 19 nt, Artificial Sequence
  Description of Artificial Sequence:  siNA antisense region
gccaagaucucugggcguc

SEQ ID NO: 2110 - RNA, 19 nt, Artificial Sequence
  Description of Artificial Sequence:  siNA antisense region
auuacagucaauacaugcg

SEQ ID NO: 2111 - RNA, 19 nt, Artificial Sequence
  Description of Artificial Sequence:  siNA antisense region
ggcauugauaugccuugca

SEQ ID NO: 2112 - RNA, 19 nt, Artificial Sequence
  Description of Artificial Sequence:  siNA antisense region
gugacuuuuugcuacuugg

SEQ ID NO: 2113 - RNA, 19 nt, Artificial Sequence
  Description of Artificial Sequence:  siNA antisense region
ccagaugagugaaacauug

SEQ ID NO: 2114 - RNA, 19 nt, Artificial Sequence
  Description of Artificial Sequence:  siNA antisense region
cauguagucuuuuacauuc

SEQ ID NO: 2115 - RNA, 19 nt, Artificial Sequence
  Description of Artificial Sequence:  siNA antisense region
cagcuguucagauaaagac

SEQ ID NO: 2116 - RNA, 19 nt, Artificial Sequence
  Description of Artificial Sequence:  siNA antisense region
acuacgaauuuguuuacgc

SEQ ID NO: 2117 - RNA, 19 nt, Artificial Sequence
  Description of Artificial Sequence:  siNA antisense region
guuguucuucuuggcagca

SEQ ID NO: 2118 - RNA, 19 nt, Artificial Sequence
  Description of Artificial Sequence:  siNA antisense region
aguuagucuaaaagguaug

SEQ ID NO: 2119 - RNA, 19 nt, Artificial Sequence
  Description of Artificial Sequence:  siNA antisense region
cugucuaguuguagcacaa

SEQ ID NO: 2120 - RNA, 19 nt, Artificial Sequence
  Description of Artificial Sequence:  siNA antisense region
aguuaugacauugacaacc

SEQ ID NO: 2121 - RNA, 19 nt, Artificial Sequence
  Description of Artificial Sequence:  siNA antisense region
cuugagugagauuuuagua

SEQ ID NO: 2122 - RNA, 19 nt, Artificial Sequence
  Description of Artificial Sequence:  siNA antisense region
acuaacaaucuuaccaccc

SEQ ID NO: 2123 - RNA, 19 nt, Artificial Sequence
  Description of Artificial Sequence:  siNA antisense region
cauaaguuuaaaacaagua

SEQ ID NO: 2124 - RNA, 19 nt, Artificial Sequence
  Description of Artificial Sequence:  siNA antisense region
caauaauguggccuuaagc

SEQ ID NO: 2125 - RNA, 19 nt, Artificial Sequence
  Description of Artificial Sequence:  siNA antisense region
caaugcagcaagaacgcac

SEQ ID NO: 2126 - RNA, 19 nt, Artificial Sequence
  Description of Artificial Sequence:  siNA antisense region
cauaacgauauaacaaacc

SEQ ID NO: 2127 - RNA, 19 nt, Artificial Sequence
  Description of Artificial Sequence:  siNA antisense region
ugacaauguauguacuggc

SEQ ID NO: 2128 - RNA, 19 nt, Artificial Sequence
  Description of Artificial Sequence:  siNA antisense region
uguguaaccaucauggauu

SEQ ID NO: 2129 - RNA, 19 nt, Artificial Sequence
  Description of Artificial Sequence:  siNA antisense region
guaaccaaugauuucauuu

SEQ ID NO: 2130 - RNA, 19 nt, Artificial Sequence
  Description of Artificial Sequence:  siNA antisense region
accauccugaauggcuuug

SEQ ID NO: 2131 - RNA, 19 nt, Artificial Sequence
  Description of Artificial Sequence:  siNA antisense region
aaugaugucacgagugaca

SEQ ID NO: 2132 - RNA, 19 nt, Artificial Sequence
  Description of Artificial Sequence:  siNA antisense region
aaaacaaucaucaguagaa

SEQ ID NO: 2133 - RNA, 19 nt, Artificial Sequence
  Description of Artificial Sequence:  siNA antisense region
accagcauguuuauuugca

SEQ ID NO: 2134 - RNA, 19 nt, Artificial Sequence
  Description of Artificial Sequence:  siNA antisense region
gcuaaaccaugcgucaaaa

SEQ ID NO: 2135 - RNA, 19 nt, Artificial Sequence
  Description of Artificial Sequence:  siNA antisense region
guaugaaccaccacgcugg

SEQ ID NO: 2136 - RNA, 19 nt, Artificial Sequence
  Description of Artificial Sequence:  siNA antisense region
gcagcuuuugucauuuuug

SEQ ID NO: 2137 - RNA, 19 nt, Artificial Sequence
  Description of Artificial Sequence:  siNA antisense region
gauagcagcuacuacaggg

SEQ ID NO: 2138 - RNA, 19 nt, Artificial Sequence
  Description of Artificial Sequence:  siNA antisense region
accaaucucucuuguaaug

SEQ ID NO: 2139 - RNA, 19 nt, Artificial Sequence
  Description of Artificial Sequence:  siNA antisense region
uaagccaggcacuaugaaa

SEQ ID NO: 2140 - RNA, 19 nt, Artificial Sequence
  Description of Artificial Sequence:  siNA antisense region
ucucagcacaguacccggu

SEQ ID NO: 2141 - RNA, 19 nt, Artificial Sequence
  Description of Artificial Sequence:  siNA antisense region
gaagucaccauugauugcu

SEQ ID NO: 2142 - RNA, 19 nt, Artificial Sequence
  Description of Artificial Sequence:  siNA antisense region
acgagguagaaaaugcaag

SEQ ID NO: 2143 - RNA, 19 nt, Artificial Sequence
  Description of Artificial Sequence:  siNA antisense region
gccaacagcacuaaaaaca

SEQ ID NO: 2144 - RNA, 19 nt, Artificial Sequence
  Description of Artificial Sequence:  siNA antisense region
agguguguagcaaauguug

SEQ ID NO: 2145 - RNA, 19 nt, Artificial Sequence
  Description of Artificial Sequence:  siNA antisense region
auacucaaugaguuuggaa

SEQ ID NO: 2146 - RNA, 19 nt, Artificial Sequence
  Description of Artificial Sequence:  siNA antisense region
agagguagcaaaaucacua

SEQ ID NO: 2147 - RNA, 19 nt, Artificial Sequence
  Description of Artificial Sequence:  siNA antisense region
agcagcaagaacgcaagca

SEQ ID NO: 2148 - RNA, 19 nt, Artificial Sequence
  Description of Artificial Sequence:  siNA antisense region
cuuaaaaauuguacacuca

SEQ ID NO: 2149 - RNA, 19 nt, Artificial Sequence
  Description of Artificial Sequence:  siNA antisense region
agguuugcccauagcaucc

SEQ ID NO: 2150 - RNA, 19 nt, Artificial Sequence
  Description of Artificial Sequence:  siNA antisense region
gucauaacaauauggcaca

SEQ ID NO: 2151 - RNA, 19 nt, Artificial Sequence
  Description of Artificial Sequence:  siNA antisense region
acccucuagcaaauuagug

SEQ ID NO: 2152 - RNA, 19 nt, Artificial Sequence
  Description of Artificial Sequence:  siNA antisense region
cucacuauaagaaauagaa

SEQ ID NO: 2153 - RNA, 19 nt, Artificial Sequence
  Description of Artificial Sequence:  siNA antisense region
acgagugucuggacgaagc

SEQ ID NO: 2154 - RNA, 19 nt, Artificial Sequence
  Description of Artificial Sequence:  siNA antisense region
accauccauaagcacauaa

SEQ ID NO: 2155 - RNA, 19 nt, Artificial Sequence
  Description of Artificial Sequence:  siNA antisense region
aggaaacuguaugauggaa

SEQ ID NO: 2156 - RNA, 19 nt, Artificial Sequence
  Description of Artificial Sequence:  siNA antisense region
acccuccagguaaguguua

SEQ ID NO: 2157 - RNA, 19 nt, Artificial Sequence
  Description of Artificial Sequence:  siNA antisense region
uguuacuacucuaacagaa

SEQ ID NO: 2158 - RNA, 19 nt, Artificial Sequence
  Description of Artificial Sequence:  siNA antisense region
guacucagcaucaaaaguu

SEQ ID NO: 2159 - RNA, 19 nt, Artificial Sequence
  Description of Artificial Sequence:  siNA antisense region
gcauguaccaugucuacag

SEQ ID NO: 2160 - RNA, 19 nt, Artificial Sequence
  Description of Artificial Sequence:  siNA antisense region
accuacuucugaccuuucg

SEQ ID NO: 2161 - RNA, 19 nt, Artificial Sequence
  Description of Artificial Sequence:  siNA antisense region
acugguagauaggcaaaua

SEQ ID NO: 2162 - RNA, 19 nt, Artificial Sequence
  Description of Artificial Sequence:  siNA antisense region
auuaagaacccaucuacca

SEQ ID NO: 2163 - RNA, 19 nt, Artificial Sequence
  Description of Artificial Sequence:  siNA antisense region
agcucuguaaugcucauua

SEQ ID NO: 2164 - RNA, 19 nt, Artificial Sequence
  Description of Artificial Sequence:  siNA antisense region
acagaaaacuccugauaga

SEQ ID NO: 2165 - RNA, 19 nt, Artificial Sequence
  Description of Artificial Sequence:  siNA antisense region
auucaucgcaucaacacca

SEQ ID NO: 2166 - RNA, 19 nt, Artificial Sequence
  Description of Artificial Sequence:  siNA antisense region
aaagauguuagcuaugaga

SEQ ID NO: 2167 - RNA, 19 nt, Artificial Sequence
  Description of Artificial Sequence:  siNA antisense region
agguugcacaagaggagua

SEQ ID NO: 2168 - RNA, 19 nt, Artificial Sequence
  Description of Artificial Sequence:  siNA antisense region
cacaucuaaagcacccaca

SEQ ID NO: 2169 - RNA, 19 nt, Artificial Sequence
  Description of Artificial Sequence:  siNA antisense region
agccacuacugaagcagac

SEQ ID NO: 2170 - RNA, 19 nt, Artificial Sequence
  Description of Artificial Sequence:  siNA antisense region
uauggcaauaauaccacca

SEQ ID NO: 2171 - RNA, 19 nt, Artificial Sequence
  Description of Artificial Sequence:  siNA antisense region
ggcagcacaagucaccaau

SEQ ID NO: 2172 - RNA, 19 nt, Artificial Sequence
  Description of Artificial Sequence:  siNA antisense region
gaauuucauaaaguaguag

SEQ ID NO: 2173 - RNA, 19 nt, Artificial Sequence
  Description of Artificial Sequence:  siNA antisense region
cucaccaaaaacacgucug

SEQ ID NO: 2174 - RNA, 19 nt, Artificial Sequence
  Description of Artificial Sequence:  siNA antisense region
agcaacaacaugguuguac

SEQ ID NO: 2175 - RNA, 19 nt, Artificial Sequence
  Description of Artificial Sequence:  siNA antisense region
aaacaaaagugcauuagca

SEQ ID NO: 2176 - RNA, 19 nt, Artificial Sequence
  Description of Artificial Sequence:  siNA antisense region
uauagugaaagacaucaaa

SEQ ID NO: 2177 - RNA, 19 nt, Artificial Sequence
  Description of Artificial Sequence:  siNA antisense region
agcugguaccagacagagu

SEQ ID NO: 2178 - RNA, 19 nt, Artificial Sequence
  Description of Artificial Sequence:  siNA antisense region
ucccggcagaaagcuguaa

SEQ ID NO: 2179 - RNA, 19 nt, Artificial Sequence
  Description of Artificial Sequence:  siNA antisense region
guaaaagacugaguagacu

SEQ ID NO: 2180 - RNA, 19 nt, Artificial Sequence
  Description of Artificial Sequence:  siNA antisense region
auagaaugucaaguacaag

SEQ ID NO: 2181 - RNA, 19 nt, Artificial Sequence
  Description of Artificial Sequence:  siNA antisense region
ugaaacaucauuggugaaa

SEQ ID NO: 2182 - RNA, 19 nt, Artificial Sequence
  Description of Artificial Sequence:  siNA antisense region
uugaaggugagccaagaau

SEQ ID NO: 2183 - RNA, 19 nt, Artificial Sequence
  Description of Artificial Sequence:  siNA antisense region
agaaaacauggcaaaccau

SEQ ID NO: 2184 - RNA, 19 nt, Artificial Sequence
  Description of Artificial Sequence:  siNA antisense region
ccaaaaaggcacaauagga

SEQ ID NO: 2185 - RNA, 19 nt, Artificial Sequence
  Description of Artificial Sequence:  siNA antisense region
uacauagauugcuguuauc

SEQ ID NO: 2186 - RNA, 19 nt, Artificial Sequence
  Description of Artificial Sequence:  siNA antisense region
cuucagagaaauacagaau

SEQ ID NO: 2187 - RNA, 19 nt, Artificial Sequence
  Description of Artificial Sequence:  siNA antisense region
aaagaaccaauggcagugc

SEQ ID NO: 2188 - RNA, 19 nt, Artificial Sequence
  Description of Artificial Sequence:  siNA antisense region
uuuccuaagauaguuguua

SEQ ID NO: 2189 - RNA, 19 nt, Artificial Sequence
  Description of Artificial Sequence:  siNA antisense region
uccauuaaacaugacucuu

SEQ ID NO: 2190 - RNA, 19 nt, Artificial Sequence
  Description of Artificial Sequence:  siNA antisense region
gaagguacuaaauguaacu

SEQ ID NO: 2191 - RNA, 19 nt, Artificial Sequence
  Description of Artificial Sequence:  siNA antisense region
acacaaagcagccuccucg

SEQ ID NO: 2192 - RNA, 19 nt, Artificial Sequence
  Description of Artificial Sequence:  siNA antisense region
cuuguugagcaaaaaggua

SEQ ID NO: 2193 - RNA, 19 nt, Artificial Sequence
  Description of Artificial Sequence:  siNA antisense region
caauuuuagguacauuucc

SEQ ID NO: 2194 - RNA, 19 nt, Artificial Sequence
  Description of Artificial Sequence:  siNA antisense region
caacagugucucgcuacgc

SEQ ID NO: 2195 - RNA, 19 nt, Artificial Sequence
  Description of Artificial Sequence:  siNA antisense region
guuauacuguguaaguggc

SEQ ID NO: 2196 - RNA, 19 nt, Artificial Sequence
  Description of Artificial Sequence:  siNA antisense region
auauagagcaagauaccug

SEQ ID NO: 2197 - RNA, 19 nt, Artificial Sequence
  Description of Artificial Sequence:  siNA antisense region
gaaauacuuguacuuguua

SEQ ID NO: 2198 - RNA, 19 nt, Artificial Sequence
  Description of Artificial Sequence:  siNA antisense region
aguaucuaaggcuccacug

SEQ ID NO: 2199 - RNA, 19 nt, Artificial Sequence
  Description of Artificial Sequence:  siNA antisense region
ugcuucacgauagcuggua

SEQ ID NO: 2200 - RNA, 19 nt, Artificial Sequence
  Description of Artificial Sequence:  siNA antisense region
ugcuaaguggcagcaagcu

SEQ ID NO: 2201 - RNA, 19 nt, Artificial Sequence
  Description of Artificial Sequence:  siNA antisense region
aaagucauuuagagccuuu

SEQ ID NO: 2202 - RNA, 19 nt, Artificial Sequence
  Description of Artificial Sequence:  siNA antisense region
aucagcaccugaguugcua

SEQ ID NO: 2203 - RNA, 19 nt, Artificial Sequence
  Description of Artificial Sequence:  siNA antisense region
uggugguugguagagaaca

SEQ ID NO: 2204 - RNA, 19 nt, Artificial Sequence
  Description of Artificial Sequence:  siNA antisense region
agaagugauugaugucugu

SEQ ID NO: 2205 - RNA, 19 nt, Artificial Sequence
  Description of Artificial Sequence:  siNA antisense region
accacucugcagaacagca

SEQ ID NO: 2206 - RNA, 19 nt, Artificial Sequence
  Description of Artificial Sequence:  siNA antisense region
gaaugccauuuuccuaaaa

SEQ ID NO: 2207 - RNA, 19 nt, Artificial Sequence
  Description of Artificial Sequence:  siNA antisense region
uucaacuuugccugacggg

SEQ ID NO: 2208 - RNA, 19 nt, Artificial Sequence
  Description of Artificial Sequence:  siNA antisense region
uacuuguaccaugcacccu

SEQ ID NO: 2209 - RNA, 19 nt, Artificial Sequence
  Description of Artificial Sequence:  siNA antisense region
aguuguaguuccacagguu

SEQ ID NO: 2210 - RNA, 19 nt, Artificial Sequence
  Description of Artificial Sequence:  siNA antisense region
caaccacaauccauuaaga

SEQ ID NO: 2211 - RNA, 19 nt, Artificial Sequence
  Description of Artificial Sequence:  siNA antisense region
acaguauacugugucaucc

SEQ ID NO: 2212 - RNA, 19 nt, Artificial Sequence
  Description of Artificial Sequence:  siNA antisense region
gcaaaugacaugucuugga

SEQ ID NO: 2213 - RNA, 19 nt, Artificial Sequence
  Description of Artificial Sequence:  siNA antisense region
aagcaugucuucugcugug

SEQ ID NO: 2214 - RNA, 19 nt, Artificial Sequence
  Description of Artificial Sequence:  siNA antisense region
aucuucauaguuaggauua

SEQ ID NO: 2215 - RNA, 19 nt, Artificial Sequence
  Description of Artificial Sequence:  siNA antisense region
ggauuugcgaaugagcaga

SEQ ID NO: 2216 - RNA, 19 nt, Artificial Sequence
  Description of Artificial Sequence:  siNA antisense region
aacaagaaagcuaugguug

SEQ ID NO: 2217 - RNA, 19 nt, Artificial Sequence
  Description of Artificial Sequence:  siNA antisense region
uugaacauugccagccuga

SEQ ID NO: 2218 - RNA, 19 nt, Artificial Sequence
  Description of Artificial Sequence:  siNA antisense region
auggccaauaacacgaagu

SEQ ID NO: 2219 - RNA, 19 nt, Artificial Sequence
  Description of Artificial Sequence:  siNA antisense region
cagacaauuuugcauagaa

SEQ ID NO: 2220 - RNA, 19 nt, Artificial Sequence
  Description of Artificial Sequence:  siNA antisense region
aucaacuuuaagccuaagc

SEQ ID NO: 2221 - RNA, 19 nt, Artificial Sequence
  Description of Artificial Sequence:  siNA antisense region
ugucuuaggguuagaagua

SEQ ID NO: 2222 - RNA, 19 nt, Artificial Sequence
  Description of Artificial Sequence:  siNA antisense region
gacaaauuuauacuugggu

SEQ ID NO: 2223 - RNA, 19 nt, Artificial Sequence
  Description of Artificial Sequence:  siNA antisense region
uugaccagguuggauacgg

SEQ ID NO: 2224 - RNA, 19 nt, Artificial Sequence
  Description of Artificial Sequence:  siNA antisense region
ugcuagaacugaaaauguu

SEQ ID NO: 2225 - RNA, 19 nt, Artificial Sequence
  Description of Artificial Sequence:  siNA antisense region
uggugaaccauuguagcau

SEQ ID NO: 2226 - RNA, 19 nt, Artificial Sequence
  Description of Artificial Sequence:  siNA antisense region
acacugauaaacaccagau

SEQ ID NO: 2227 - RNA, 19 nt, Artificial Sequence
  Description of Artificial Sequence:  siNA antisense region
augauuaggucucauggca

SEQ ID NO: 2228 - RNA, 19 nt, Artificial Sequence
  Description of Artificial Sequence:  siNA antisense region
gaaagaaccuuuaauggua

SEQ ID NO: 2229 - RNA, 19 nt, Artificial Sequence
  Description of Artificial Sequence:  siNA antisense region
accacaugauccauuaagg

SEQ ID NO: 2230 - RNA, 19 nt, Artificial Sequence
  Description of Artificial Sequence:  siNA antisense region
aauguuaaaaccaacacua

SEQ ID NO: 2231 - RNA, 19 nt, Artificial Sequence
  Description of Artificial Sequence:  siNA antisense region
agacacgcaaucauaauca

SEQ ID NO: 2232 - RNA, 19 nt, Artificial Sequence
  Description of Artificial Sequence:  siNA antisense region
augaugcauauagcagaaa

SEQ ID NO: 2233 - RNA, 19 nt, Artificial Sequence
  Description of Artificial Sequence:  siNA antisense region
uccuguuggaagcuccaua

SEQ ID NO: 2234 - RNA, 19 nt, Artificial Sequence
  Description of Artificial Sequence:  siNA antisense region
gucaguaccagcguguacu

SEQ ID NO: 2235 - RNA, 19 nt, Artificial Sequence
  Description of Artificial Sequence:  siNA antisense region
auagaauuuaccuucuaag

SEQ ID NO: 2236 - RNA, 19 nt, Artificial Sequence
  Description of Artificial Sequence:  siNA antisense region
ucugucaacaaauggacca

SEQ ID NO: 2237 - RNA, 19 nt, Artificial Sequence
  Description of Artificial Sequence:  siNA antisense region
ugcagccugugcaguuugu

SEQ ID NO: 2238 - RNA, 19 nt, Artificial Sequence
  Description of Artificial Sequence:  siNA antisense region
uaugguugugucuguaccu

SEQ ID NO: 2239 - RNA, 19 nt, Artificial Sequence
  Description of Artificial Sequence:  siNA antisense region
ugccaaaacauuuaauguu

SEQ ID NO: 2240 - RNA, 19 nt, Artificial Sequence
  Description of Artificial Sequence:  siNA antisense region
aacagcagcauacagccau

SEQ ID NO: 2241 - RNA, 19 nt, Artificial Sequence
  Description of Artificial Sequence:  siNA antisense region
ccaccuaucaccauugaua

SEQ ID NO: 2242 - RNA, 19 nt, Artificial Sequence
  Description of Artificial Sequence:  siNA antisense region
ggugaaucuauuaagaaac

SEQ ID NO: 2243 - RNA, 19 nt, Artificial Sequence
  Description of Artificial Sequence:  siNA antisense region
aaagucauucaaaguagug

SEQ ID NO: 2244 - RNA, 19 nt, Artificial Sequence
  Description of Artificial Sequence:  siNA antisense region
cuucauugccacaagguua

SEQ ID NO: 2245 - RNA, 19 nt, Artificial Sequence
  Description of Artificial Sequence:  siNA antisense region
caaagguucauaguuguac

SEQ ID NO: 2246 - RNA, 19 nt, Artificial Sequence
  Description of Artificial Sequence:  siNA antisense region
gucaacaugaucuuguguc

SEQ ID NO: 2247 - RNA, 19 nt, Artificial Sequence
  Description of Artificial Sequence:  siNA antisense region
agaaagaggucccaauaug

SEQ ID NO: 2248 - RNA, 19 nt, Artificial Sequence
  Description of Artificial Sequence:  siNA antisense region
ggcaauuccuguuugagca

SEQ ID NO: 2249 - RNA, 19 nt, Artificial Sequence
  Description of Artificial Sequence:  siNA antisense region
agcacacauaucuaagacg

SEQ ID NO: 2250 - RNA, 19 nt, Artificial Sequence
  Description of Artificial Sequence:  siNA antisense region
cagcagcucuuucaaagca

SEQ ID NO: 2251 - RNA, 19 nt, Artificial Sequence
  Description of Artificial Sequence:  siNA antisense region
accauucauaccauucugc

SEQ ID NO: 2252 - RNA, 19 nt, Artificial Sequence
  Description of Artificial Sequence:  siNA antisense region
gcuaccaaggauaguacga

SEQ ID NO: 2253 - RNA, 19 nt, Artificial Sequence
  Description of Artificial Sequence:  siNA antisense region
cucaucuucuaaaauagug

SEQ ID NO: 2254 - RNA, 19 nt, Artificial Sequence
  Description of Artificial Sequence:  siNA antisense region
aacaucaaaugguguaaac

SEQ ID NO: 2255 - RNA, 19 nt, Artificial Sequence
  Description of Artificial Sequence:  siNA antisense region
accagagcauugucuaaca

SEQ ID NO: 2256 - RNA, 19 nt, Artificial Sequence
  Description of Artificial Sequence:  siNA antisense region
cuuaccuuggaagguaaca

SEQ ID NO: 2257 - RNA, 19 nt, Artificial Sequence
  Description of Artificial Sequence:  siNA antisense region
cuuaacaauuuucuugaac

SEQ ID NO: 2258 - RNA, 19 nt, Artificial Sequence
  Description of Artificial Sequence:  siNA antisense region
cauccaaugaugagugccc

SEQ ID NO: 2259 - RNA, 19 nt, Artificial Sequence
  Description of Artificial Sequence:  siNA antisense region
ugucaagaaaguuaaaagc

SEQ ID NO: 2260 - RNA, 19 nt, Artificial Sequence
  Description of Artificial Sequence:  siNA antisense region
aacaagaaucaauagugau

SEQ ID NO: 2261 - RNA, 19 nt, Artificial Sequence
  Description of Artificial Sequence:  siNA antisense region
ugaccacuguguacuuuga

SEQ ID NO: 2262 - RNA, 19 nt, Artificial Sequence
  Description of Artificial Sequence:  siNA antisense region
guaaacaaagaaaaacagu

SEQ ID NO: 2263 - RNA, 19 nt, Artificial Sequence
  Description of Artificial Sequence:  siNA antisense region
uggcaagaaagcauucucg

SEQ ID NO: 2264 - RNA, 19 nt, Artificial Sequence
  Description of Artificial Sequence:  siNA antisense region
cauaauaccaagaguaaau

SEQ ID NO: 2265 - RNA, 19 nt, Artificial Sequence
  Description of Artificial Sequence:  siNA antisense region
agcacaugcagcaauugcc

SEQ ID NO: 2266 - RNA, 19 nt, Artificial Sequence
  Description of Artificial Sequence:  siNA antisense region
augcuuaacaagcagcaua

SEQ ID NO: 2267 - RNA, 19 nt, Artificial Sequence
  Description of Artificial Sequence:  siNA antisense region
gcacaagaaugcgugcuua

SEQ ID NO: 2268 - RNA, 19 nt, Artificial Sequence
  Description of Artificial Sequence:  siNA antisense region
agaagguaacagaaacaag

SEQ ID NO: 2269 - RNA, 19 nt, Artificial Sequence
  Description of Artificial Sequence:  siNA antisense region
guaagcaacuguugcaaga

SEQ ID NO: 2270 - RNA, 19 nt, Artificial Sequence
  Description of Artificial Sequence:  siNA antisense region
cauguagaccauauuaaag

SEQ ID NO: 2271 - RNA, 19 nt, Artificial Sequence
  Description of Artificial Sequence:  siNA antisense region
caucacccagcuagcaggc

SEQ ID NO: 2272 - RNA, 19 nt, Artificial Sequence
  Description of Artificial Sequence:  siNA antisense region
aagccaugucaugauacgc

SEQ ID NO: 2273 - RNA, 19 nt, Artificial Sequence
  Description of Artificial Sequence:  siNA antisense region
gcuagugucagccaauuca

SEQ ID NO: 2274 - RNA, 19 nt, Artificial Sequence
  Description of Artificial Sequence:  siNA antisense region
aagccuauaaccagacaag

SEQ ID NO: 2275 - RNA, 19 nt, Artificial Sequence
  Description of Artificial Sequence:  siNA antisense region
auacauaacacaauccuua

SEQ ID NO: 2276 - RNA, 19 nt, Artificial Sequence
  Description of Artificial Sequence:  siNA antisense region
caaaacuaaagcugaagca

SEQ ID NO: 2277 - RNA, 19 nt, Artificial Sequence
  Description of Artificial Sequence:  siNA antisense region
agcugucaugagaauaagc

SEQ ID NO: 2278 - RNA, 19 nt, Artificial Sequence
  Description of Artificial Sequence:  siNA antisense region
aucaucauaaacagugcga

SEQ ID NO: 2279 - RNA, 19 nt, Artificial Sequence
  Description of Artificial Sequence:  siNA antisense region
ccaaacacgucuagcagca

SEQ ID NO: 2280 - RNA, 19 nt, Artificial Sequence
  Description of Artificial Sequence:  siNA antisense region
aaugacauucaucaguguc

SEQ ID NO: 2281 - RNA, 19 nt, Artificial Sequence
  Description of Artificial Sequence:  siNA antisense region
gacuuuguaaacaagugua

SEQ ID NO: 2282 - RNA, 19 nt, Artificial Sequence
  Description of Artificial Sequence:  siNA antisense region
uaaagcauuaccauaguag

SEQ ID NO: 2283 - RNA, 19 nt, Artificial Sequence
  Description of Artificial Sequence:  siNA antisense region
cauggaaauagcuugaucu

SEQ ID NO: 2284 - RNA, 19 nt, Artificial Sequence
  Description of Artificial Sequence:  siNA antisense region
agaaauaacuaaggcccac

SEQ ID NO: 2285 - RNA, 19 nt, Artificial Sequence
  Description of Artificial Sequence:  siNA antisense region
agaauaguuagagguuaca

SEQ ID NO: 2286 - RNA, 19 nt, Artificial Sequence
  Description of Artificial Sequence:  siNA antisense region
gauagucguaacgacacca

SEQ ID NO: 2287 - RNA, 19 nt, Artificial Sequence
  Description of Artificial Sequence:  siNA antisense region
agcucuagcuaaaaacaug

SEQ ID NO: 2288 - RNA, 19 nt, Artificial Sequence
  Description of Artificial Sequence:  siNA antisense region
aacacacacaaacacuaua

SEQ ID NO: 2289 - RNA, 19 nt, Artificial Sequence
  Description of Artificial Sequence:  siNA antisense region
uaacaauggguaauacuca

SEQ ID NO: 2290 - RNA, 19 nt, Artificial Sequence
  Description of Artificial Sequence:  siNA antisense region
gguguugccaguaauaaau

SEQ ID NO: 2291 - RNA, 19 nt, Artificial Sequence
  Description of Artificial Sequence:  siNA antisense region
aagcaugauacacuguaag

SEQ ID NO: 2292 - RNA, 19 nt, Artificial Sequence
  Description of Artificial Sequence:  siNA antisense region
gccuaagaaacaauaaaca

SEQ ID NO: 2293 - RNA, 19 nt, Artificial Sequence
  Description of Artificial Sequence:  siNA antisense region
guagcagcagcaacaauag

SEQ ID NO: 2294 - RNA, 19 nt, Artificial Sequence
  Description of Artificial Sequence:  siNA antisense region
uaaacagaaaaggccaaag

SEQ ID NO: 2295 - RNA, 19 nt, Artificial Sequence
  Description of Artificial Sequence:  siNA antisense region
ccugaaguaacgguugagu

SEQ ID NO: 2296 - RNA, 19 nt, Artificial Sequence
  Description of Artificial Sequence:  siNA antisense region
auaaacaccaagaguaagc

SEQ ID NO: 2297 - RNA, 19 nt, Artificial Sequence
  Description of Artificial Sequence:  siNA antisense region
uguagagaccaaguaguca

SEQ ID NO: 2298 - RNA, 19 nt, Artificial Sequence
  Description of Artificial Sequence:  siNA antisense region
cauauaccuaaauucuugu

SEQ ID NO: 2299 - RNA, 19 nt, Artificial Sequence
  Description of Artificial Sequence:  siNA antisense region
caaaagccccugggaguuc

SEQ ID NO: 2300 - RNA, 19 nt, Artificial Sequence
  Description of Artificial Sequence:  siNA antisense region
aauacuacucuuaggaggc

SEQ ID NO: 2301 - RNA, 19 nt, Artificial Sequence
  Description of Artificial Sequence:  siNA antisense region
guuaagcuugaaagcauca

SEQ ID NO: 2302 - RNA, 19 nt, Artificial Sequence
  Description of Artificial Sequence:  siNA antisense region
aauacccaacaacuuaaug

SEQ ID NO: 2303 - RNA, 19 nt, Artificial Sequence
  Description of Artificial Sequence:  siNA antisense region
gauacaugguuuaccucca

SEQ ID NO: 2304 - RNA, 19 nt, Artificial Sequence
  Description of Artificial Sequence:  siNA antisense region
cuguacaguagcaaccuug

SEQ ID NO: 2305 - RNA, 19 nt, Artificial Sequence
  Description of Artificial Sequence:  siNA antisense region
uacgucagacauuuuagac

SEQ ID NO: 2306 - RNA, 19 nt, Artificial Sequence
  Description of Artificial Sequence:  siNA antisense region
uaccacagaugugcacuuu

SEQ ID NO: 2307 - RNA, 19 nt, Artificial Sequence
  Description of Artificial Sequence:  siNA antisense region
uugaagaaccgagagcagu

SEQ ID NO: 2308 - RNA, 19 nt, Artificial Sequence
  Description of Artificial Sequence:  siNA antisense region
ugacucuacucuaaguugu

SEQ ID NO: 2309 - RNA, 19 nt, Artificial Sequence
  Description of Artificial Sequence:  siNA antisense region
ugcccacaauuuagaagau

SEQ ID NO: 2310 - RNA, 19 nt, Artificial Sequence
  Description of Artificial Sequence:  siNA antisense region
guggaguuguacacauugu

SEQ ID NO: 2311 - RNA, 19 nt, Artificial Sequence
  Description of Artificial Sequence:  siNA antisense region
ugcaagaagaauaucauug

SEQ ID NO: 2312 - RNA, 19 nt, Artificial Sequence
  Description of Artificial Sequence:  siNA antisense region
agcuucaguugugucuuuu

SEQ ID NO: 2313 - RNA, 19 nt, Artificial Sequence
  Description of Artificial Sequence:  siNA antisense region
agaaaccaucuucucgaaa

SEQ ID NO: 2314 - RNA, 19 nt, Artificial Sequence
  Description of Artificial Sequence:  siNA antisense region
uagcaaaacagacaaaaga

SEQ ID NO: 2315 - RNA, 19 nt, Artificial Sequence
  Description of Artificial Sequence:  siNA antisense region
uacagcacccugcauggau

SEQ ID NO: 2316 - RNA, 19 nt, Artificial Sequence
  Description of Artificial Sequence:  siNA antisense region
gcacaaccuauuaaugucu

SEQ ID NO: 2317 - RNA, 19 nt, Artificial Sequence
  Description of Artificial Sequence:  siNA antisense region
guuaucgagcauuuccucg

SEQ ID NO: 2318 - RNA, 19 nt, Artificial Sequence
  Description of Artificial Sequence:  siNA antisense region
agccugaagaguagcacgg

SEQ ID NO: 2319 - RNA, 19 nt, Artificial Sequence
  Description of Artificial Sequence:  siNA antisense region
acuaaauucugaagcaaua

SEQ ID NO: 2320 - RNA, 19 nt, Artificial Sequence
  Description of Artificial Sequence:  siNA antisense region
ggcauaugaugguaaagaa

SEQ ID NO: 2321 - RNA, 19 nt, Artificial Sequence
  Description of Artificial Sequence:  siNA antisense region
cugggcaguggcauaagcg

SEQ ID NO: 2322 - RNA, 19 nt, Artificial Sequence
  Description of Artificial Sequence:  siNA antisense region
agccugcucauaggccucc

SEQ ID NO: 2323 - RNA, 19 nt, Artificial Sequence
  Description of Artificial Sequence:  siNA antisense region
agaaucaccauuagcuaca

SEQ ID NO: 2324 - RNA, 19 nt, Artificial Sequence
  Description of Artificial Sequence:  siNA antisense region
cuuuuugagaacgacuuca

SEQ ID NO: 2325 - RNA, 19 nt, Artificial Sequence
  Description of Artificial Sequence:  siNA antisense region
auucaaagauuucuuuaac

SEQ ID NO: 2326 - RNA, 19 nt, Artificial Sequence
  Description of Artificial Sequence:  siNA antisense region
aaacucagauuuagccaca

SEQ ID NO: 2327 - RNA, 19 nt, Artificial Sequence
  Description of Artificial Sequence:  siNA antisense region
cauggcagcaucacgguca

SEQ ID NO: 2328 - RNA, 19 nt, Artificial Sequence
  Description of Artificial Sequence:  siNA antisense region
cuuuuccaacuugcguugc

SEQ ID NO: 2329 - RNA, 19 nt, Artificial Sequence
  Description of Artificial Sequence:  siNA antisense region
cauagccugaucugccauc

SEQ ID NO: 2330 - RNA, 19 nt, Artificial Sequence
  Description of Artificial Sequence:  siNA antisense region
cuguuuguacauuuggguc

SEQ ID NO: 2331 - RNA, 19 nt, Artificial Sequence
  Description of Artificial Sequence:  siNA antisense region
cuuguccucagaucuugcc

SEQ ID NO: 2332 - RNA, 19 nt, Artificial Sequence
  Description of Artificial Sequence:  siNA antisense region
acuaguuacuuuugcccuc

SEQ ID NO: 2333 - RNA, 19 nt, Artificial Sequence
  Description of Artificial Sequence:  siNA antisense region
gagcauuguuugcauagca

SEQ ID NO: 2334 - RNA, 19 nt, Artificial Sequence
  Description of Artificial Sequence:  siNA antisense region
cuuccuaagcauagugaag

SEQ ID NO: 2335 - RNA, 19 nt, Artificial Sequence
  Description of Artificial Sequence:  siNA antisense region
aagugcaucauuaucaagc

SEQ ID NO: 2336 - RNA, 19 nt, Artificial Sequence
  Description of Artificial Sequence:  siNA antisense region
auuguugauaauguuguua

SEQ ID NO: 2337 - RNA, 19 nt, Artificial Sequence
  Description of Artificial Sequence:  siNA antisense region
aacacaaccaucacgcgca

SEQ ID NO: 2338 - RNA, 19 nt, Artificial Sequence
  Description of Artificial Sequence:  siNA antisense region
ugguaugauguugagugga

SEQ ID NO: 2339 - RNA, 19 nt, Artificial Sequence
  Description of Artificial Sequence:  siNA antisense region
uuuggcugcuguagucaau

SEQ ID NO: 2340 - RNA, 19 nt, Artificial Sequence
  Description of Artificial Sequence:  siNA antisense region
agggacaacaaccaugagu

SEQ ID NO: 2341 - RNA, 19 nt, Artificial Sequence
  Description of Artificial Sequence:  siNA antisense region
cuuguagguaccauaauca

SEQ ID NO: 2342 - RNA, 19 nt, Artificial Sequence
  Description of Artificial Sequence:  siNA antisense region
guuaccaucacaaguguuc

SEQ ID NO: 2343 - RNA, 19 nt, Artificial Sequence
  Description of Artificial Sequence:  siNA antisense region
agaugcauauguaaaggug

SEQ ID NO: 2344 - RNA, 19 nt, Artificial Sequence
  Description of Artificial Sequence:  siNA antisense region
cuggauuucccagagugca

SEQ ID NO: 2345 - RNA, 19 nt, Artificial Sequence
  Description of Artificial Sequence:  siNA antisense region
auccgcaucaacaacuugc

SEQ ID NO: 2346 - RNA, 19 nt, Artificial Sequence
  Description of Artificial Sequence:  siNA antisense region
aaguugaacaaucuugcua

SEQ ID NO: 2347 - RNA, 19 nt, Artificial Sequence
  Description of Artificial Sequence:  siNA antisense region
guccauguuaauuucacua

SEQ ID NO: 2348 - RNA, 19 nt, Artificial Sequence
  Description of Artificial Sequence:  siNA antisense region
agccaaauuuggugaauug

SEQ ID NO: 2349 - RNA, 19 nt, Artificial Sequence
  Description of Artificial Sequence:  siNA antisense region
uguaacaauaagaggccaa

SEQ ID NO: 2350 - RNA, 19 nt, Artificial Sequence
  Description of Artificial Sequence:  siNA antisense region
ugaguuggcucuuagagcu

SEQ ID NO: 2351 - RNA, 19 nt, Artificial Sequence
  Description of Artificial Sequence:  siNA antisense region
auucuguaguuuaacagcu

SEQ ID NO: 2352 - RNA, 19 nt, Artificial Sequence
  Description of Artificial Sequence:  siNA antisense region
uacuggacucaguucauua

SEQ ID NO: 2353 - RNA, 19 nt, Artificial Sequence
  Description of Artificial Sequence:  siNA antisense region
ggacaucugucguagugcu

SEQ ID NO: 2354 - RNA, 19 nt, Artificial Sequence
  Description of Artificial Sequence:  siNA antisense region
ugugguaccagccgcacag

SEQ ID NO: 2355 - RNA, 19 nt, Artificial Sequence
  Description of Artificial Sequence:  siNA antisense region
aucaguacaagcuguuugu

SEQ ID NO: 2356 - RNA, 19 nt, Artificial Sequence
  Description of Artificial Sequence:  siNA antisense region
guaggcaagugcauuguca

SEQ ID NO: 2357 - RNA, 19 nt, Artificial Sequence
  Description of Artificial Sequence:  siNA antisense region
ucccuucgaauuguuauag

SEQ ID NO: 2358 - RNA, 19 nt, Artificial Sequence
  Description of Artificial Sequence:  siNA antisense region
ugccagcacaaaccuaccu

SEQ ID NO: 2359 - RNA, 19 nt, Artificial Sequence
  Description of Artificial Sequence:  siNA antisense region
uugguggucugauaguaau

SEQ ID NO: 2360 - RNA, 19 nt, Artificial Sequence
  Description of Artificial Sequence:  siNA antisense region
ucuagcccauuugagaucu

SEQ ID NO: 2361 - RNA, 19 nt, Artificial Sequence
  Description of Artificial Sequence:  siNA antisense region
accaucacucuuagggaau

SEQ ID NO: 2362 - RNA, 19 nt, Artificial Sequence
  Description of Artificial Sequence:  siNA antisense region
uguguaaauuguaccugua

SEQ ID NO: 2363 - RNA, 19 nt, Artificial Sequence
  Description of Artificial Sequence:  siNA antisense region
acaaggugguuccaguucu

SEQ ID NO: 2364 - RNA, 19 nt, Artificial Sequence
  Description of Artificial Sequence:  siNA antisense region
ugugucuguaacaaaccua

SEQ ID NO: 2365 - RNA, 19 nt, Artificial Sequence
  Description of Artificial Sequence:  siNA antisense region
cacuuuaggcccuuuuggu

SEQ ID NO: 2366 - RNA, 19 nt, Artificial Sequence
  Description of Artificial Sequence:  siNA antisense region
gaugaaguacaaguauuuc

SEQ ID NO: 2367 - RNA, 19 nt, Artificial Sequence
  Description of Artificial Sequence:  siNA antisense region
uagguuguuuaagccuuug

SEQ ID NO: 2368 - RNA, 19 nt, Artificial Sequence
  Description of Artificial Sequence:  siNA antisense region
cagcaccauaccucuauuu

SEQ ID NO: 2369 - RNA, 19 nt, Artificial Sequence
  Description of Artificial Sequence:  siNA antisense region
uguagcagcuaaacugccc

SEQ ID NO: 2370 - RNA, 19 nt, Artificial Sequence
  Description of Artificial Sequence:  siNA antisense region
uccagccugaagacguacu

SEQ ID NO: 2371 - RNA, 19 nt, Artificial Sequence
  Description of Artificial Sequence:  siNA antisense region
agguacuucuguagcauuu

SEQ ID NO: 2372 - RNA, 19 nt, Artificial Sequence
  Description of Artificial Sequence:  siNA antisense region
aagcacaguugaauuggca

SEQ ID NO: 2373 - RNA, 19 nt, Artificial Sequence
  Description of Artificial Sequence:  siNA antisense region
ugcaaaagcacagaaggaa

SEQ ID NO: 2374 - RNA, 19 nt, Artificial Sequence
  Description of Artificial Sequence:  siNA antisense region
ugcuuuagcagggucuacu

SEQ ID NO: 2375 - RNA, 19 nt, Artificial Sequence
  Description of Artificial Sequence:  siNA antisense region
ugcuagguaauccuuauau

SEQ ID NO: 2376 - RNA, 19 nt, Artificial Sequence
  Description of Artificial Sequence:  siNA antisense region
gauugguuguccuccacuu

SEQ ID NO: 2377 - RNA, 19 nt, Artificial Sequence
  Description of Artificial Sequence:  siNA antisense region
caucuucacacaguuggug

SEQ ID NO: 2378 - RNA, 19 nt, Artificial Sequence
  Description of Artificial Sequence:  siNA antisense region
accaguguguguacacaac

SEQ ID NO: 2379 - RNA, 19 nt, Artificial Sequence
  Description of Artificial Sequence:  siNA antisense region
aguaauugccuguccugua

SEQ ID NO: 2380 - RNA, 19 nt, Artificial Sequence
  Description of Artificial Sequence:  siNA antisense region
guuagcuucugguguuaca

SEQ ID NO: 2381 - RNA, 19 nt, Artificial Sequence
  Description of Artificial Sequence:  siNA antisense region
aaaggacucuugguccaug

SEQ ID NO: 2382 - RNA, 19 nt, Artificial Sequence
  Description of Artificial Sequence:  siNA antisense region
acaacaugaagcaccacca

SEQ ID NO: 2383 - RNA, 19 nt, Artificial Sequence
  Description of Artificial Sequence:  siNA antisense region
guggcaucuacaauacaga

SEQ ID NO: 2384 - RNA, 19 nt, Artificial Sequence
  Description of Artificial Sequence:  siNA antisense region
aggauuuggauggucaaug

SEQ ID NO: 2385 - RNA, 19 nt, Artificial Sequence
  Description of Artificial Sequence:  siNA antisense region
caagucacagaauccuuua

SEQ ID NO: 2386 - RNA, 19 nt, Artificial Sequence
  Description of Artificial Sequence:  siNA antisense region
uuggacguacuuaccuuuc

SEQ ID NO: 2387 - RNA, 19 nt, Artificial Sequence
  Description of Artificial Sequence:  siNA antisense region
agcacaagugguagguauu

SEQ ID NO: 2388 - RNA, 19 nt, Artificial Sequence
  Description of Artificial Sequence:  siNA antisense region
aaaacccacugggucauua

SEQ ID NO: 2389 - RNA, 19 nt, Artificial Sequence
  Description of Artificial Sequence:  siNA antisense region
gacuguguuucuaagugua

SEQ ID NO: 2390 - RNA, 19 nt, Artificial Sequence
  Description of Artificial Sequence:  siNA antisense region
cauuccgcagacgguacag

SEQ ID NO: 2391 - RNA, 19 nt, Artificial Sequence
  Description of Artificial Sequence:  siNA antisense region
acagccauaaccuuuccac

SEQ ID NO: 2392 - RNA, 19 nt, Artificial Sequence
  Description of Artificial Sequence:  siNA antisense region
gcggaguuggucacaacua

SEQ ID NO: 2393 - RNA, 19 nt, Artificial Sequence
  Description of Artificial Sequence:  siNA antisense region
agacugcaucaaggguucg

SEQ ID NO: 2394 - RNA, 19 nt, Artificial Sequence
  Description of Artificial Sequence:  siNA antisense region
aaacguugaugcauccgca

SEQ ID NO: 2395 - RNA, 19 nt, Artificial Sequence
  Description of Artificial Sequence:  siNA antisense region
caccgcaaacccguuuaaa

SEQ ID NO: 2396 - RNA, 19 nt, Artificial Sequence
  Description of Artificial Sequence:  siNA antisense region
uaagacgggcugcacuuac

SEQ ID NO: 2397 - RNA, 19 nt, Artificial Sequence
  Description of Artificial Sequence:  siNA antisense region
ugccugugccgcacggugu

SEQ ID NO: 2398 - RNA, 19 nt, Artificial Sequence
  Description of Artificial Sequence:  siNA antisense region
agacgacaucaguacuagu

SEQ ID NO: 2399 - RNA, 19 nt, Artificial Sequence
  Description of Artificial Sequence:  siNA antisense region
aaauaucaaaagcccugua

SEQ ID NO: 2400 - RNA, 19 nt, Artificial Sequence
  Description of Artificial Sequence:  siNA antisense region
cagcaacuuuuucguugua

SEQ ID NO: 2401 - RNA, 19 nt, Artificial Sequence
  Description of Artificial Sequence:  siNA antisense region
uuaggaacuuugcaaaacc

SEQ ID NO: 2402 - RNA, 19 nt, Artificial Sequence
  Description of Artificial Sequence:  siNA antisense region
agcgacagcaauuaguuuu

SEQ ID NO: 2403 - RNA, 19 nt, Artificial Sequence
  Description of Artificial Sequence:  siNA antisense region
ccucauccuucuccuggaa

SEQ ID NO: 2404 - RNA, 19 nt, Artificial Sequence
  Description of Artificial Sequence:  siNA antisense region
agucuaauaaauugccuuc

SEQ ID NO: 2405 - RNA, 19 nt, Artificial Sequence
  Description of Artificial Sequence:  siNA antisense region
ucuuaacuacaaaguaaga

SEQ ID NO: 2406 - RNA, 19 nt, Artificial Sequence
  Description of Artificial Sequence:  siNA antisense region
aguuagacauaguaugccu

SEQ ID NO: 2407 - RNA, 19 nt, Artificial Sequence
  Description of Artificial Sequence:  siNA antisense region
uagucucuucauguuggua

SEQ ID NO: 2408 - RNA, 19 nt, Artificial Sequence
  Description of Artificial Sequence:  siNA antisense region
cuuuaaccaaguuauaaau

SEQ ID NO: 2409 - RNA, 19 nt, Artificial Sequence
  Description of Artificial Sequence:  siNA antisense region
cagcaaccgcuggacaauc

SEQ ID NO: 2410 - RNA, 19 nt, Artificial Sequence
  Description of Artificial Sequence:  siNA antisense region
acuugaaaaagucauggac

SEQ ID NO: 2411 - RNA, 19 nt, Artificial Sequence
  Description of Artificial Sequence:  siNA antisense region
ugucaccaucuacucuaaa

SEQ ID NO: 2412 - RNA, 19 nt, Artificial Sequence
  Description of Artificial Sequence:  siNA antisense region
gugauauaugugguaccau

SEQ ID NO: 2413 - RNA, 19 nt, Artificial Sequence
  Description of Artificial Sequence:  siNA antisense region
auuuaguuagacgcugacg

SEQ ID NO: 2414 - RNA, 19 nt, Artificial Sequence
  Description of Artificial Sequence:  siNA antisense region
cuaaaucagccauugugua

SEQ ID NO: 2415 - RNA, 19 nt, Artificial Sequence
  Description of Artificial Sequence:  siNA antisense region
aaugacguagagcauagac

SEQ ID NO: 2416 - RNA, 19 nt, Artificial Sequence
  Description of Artificial Sequence:  siNA antisense region
cacaauuacccucaucaaa

SEQ ID NO: 2417 - RNA, 19 nt, Artificial Sequence
  Description of Artificial Sequence:  siNA antisense region
guauuucuuuuaauguauc

SEQ ID NO: 2418 - RNA, 19 nt, Artificial Sequence
  Description of Artificial Sequence:  siNA antisense region
agcaauuguaugugacgag

SEQ ID NO: 2419 - RNA, 19 nt, Artificial Sequence
  Description of Artificial Sequence:  siNA antisense region
ugaaauaaucaucaucaca

SEQ ID NO: 2420 - RNA, 19 nt, Artificial Sequence
  Description of Artificial Sequence:  siNA antisense region
cauaccaauccuucuuauu

SEQ ID NO: 2421 - RNA, 19 nt, Artificial Sequence
  Description of Artificial Sequence:  siNA antisense region
caggauucucuacgaaguc

SEQ ID NO: 2422 - RNA, 19 nt, Artificial Sequence
  Description of Artificial Sequence:  siNA antisense region
cauauacgcguaagauguc

SEQ ID NO: 2423 - RNA, 19 nt, Artificial Sequence
  Description of Artificial Sequence:  siNA antisense region
cacgcucaccuaaguuagc

SEQ ID NO: 2424 - RNA, 19 nt, Artificial Sequence
  Description of Artificial Sequence:  siNA antisense region
uuaauaaugauuggcguac

SEQ ID NO: 2425 - RNA, 19 nt, Artificial Sequence
  Description of Artificial Sequence:  siNA antisense region
cgcagaauuguacagucuu

SEQ ID NO: 2426 - RNA, 19 nt, Artificial Sequence
  Description of Artificial Sequence:  siNA antisense region
cugcaucacgcauagcauc

SEQ ID NO: 2427 - RNA, 19 nt, Artificial Sequence
  Description of Artificial Sequence:  siNA antisense region
ucaguacgccuacaaugcc

SEQ ID NO: 2428 - RNA, 19 nt, Artificial Sequence
  Description of Artificial Sequence:  siNA antisense region
gauccugauuaucuaaugu

SEQ ID NO: 2429 - RNA, 19 nt, Artificial Sequence
  Description of Artificial Sequence:  siNA antisense region
cguaccaguucccauuaag

SEQ ID NO: 2430 - RNA, 19 nt, Artificial Sequence
  Description of Artificial Sequence:  siNA antisense region
guacgaaaucaccgaaauc

SEQ ID NO: 2431 - RNA, 19 nt, Artificial Sequence
  Description of Artificial Sequence:  siNA antisense region
cgcagccuggugcuacuug

SEQ ID NO: 2432 - RNA, 19 nt, Artificial Sequence
  Description of Artificial Sequence:  siNA antisense region
aauccacaauaggaacucc

SEQ ID NO: 2433 - RNA, 19 nt, Artificial Sequence
  Description of Artificial Sequence:  siNA antisense region
ucagcaaugaguaauauga

SEQ ID NO: 2434 - RNA, 19 nt, Artificial Sequence
  Description of Artificial Sequence:  siNA antisense region
ucaaagugaggaugggcau

SEQ ID NO: 2435 - RNA, 19 nt, Artificial Sequence
  Description of Artificial Sequence:  siNA antisense region
cagcagccaaugcccuagu

SEQ ID NO: 2436 - RNA, 19 nt, Artificial Sequence
  Description of Artificial Sequence:  siNA antisense region
cagcauccauaugggacuc

SEQ ID NO: 2437 - RNA, 19 nt, Artificial Sequence
  Description of Artificial Sequence:  siNA antisense region
uaagugguuuugcgagauc

SEQ ID NO: 2438 - RNA, 19 nt, Artificial Sequence
  Description of Artificial Sequence:  siNA antisense region
ucagcaaaucccacuuaau

SEQ ID NO: 2439 - RNA, 19 nt, Artificial Sequence
  Description of Artificial Sequence:  siNA antisense region
cuuccguaaaaucauauuu

SEQ ID NO: 2440 - RNA, 19 nt, Artificial Sequence
  Description of Artificial Sequence:  siNA antisense region
cgaagagacaaagucucuc

SEQ ID NO: 2441 - RNA, 19 nt, Artificial Sequence
  Description of Artificial Sequence:  siNA antisense region
aauauuuaaaauaacgguc

SEQ ID NO: 2442 - RNA, 19 nt, Artificial Sequence
  Description of Artificial Sequence:  siNA antisense region
gaugguaugucugguccca

SEQ ID NO: 2443 - RNA, 19 nt, Artificial Sequence
  Description of Artificial Sequence:  siNA antisense region
aacaguuaauacaauuggg

SEQ ID NO: 2444 - RNA, 19 nt, Artificial Sequence
  Description of Artificial Sequence:  siNA antisense region
ggauacaccuaucauccaa

SEQ ID NO: 2445 - RNA, 19 nt, Artificial Sequence
  Description of Artificial Sequence:  siNA antisense region
uaaaguuugcacaaugaag

SEQ ID NO: 2446 - RNA, 19 nt, Artificial Sequence
  Description of Artificial Sequence:  siNA antisense region
caguagaaaauaacacauu

SEQ ID NO: 2447 - RNA, 19 nt, Artificial Sequence
  Description of Artificial Sequence:  siNA antisense region
aacuuguagguggaaacac

SEQ ID NO: 2448 - RNA, 19 nt, Artificial Sequence
  Description of Artificial Sequence:  siNA antisense region
uucuuacuagugguccaaa

SEQ ID NO: 2449 - RNA, 19 nt, Artificial Sequence
  Description of Artificial Sequence:  siNA antisense region
caccaucuacaaauauuuu

SEQ ID NO: 2450 - RNA, 19 nt, Artificial Sequence
  Description of Artificial Sequence:  siNA antisense region
uugaaacaacaaaaggaac

SEQ ID NO: 2451 - RNA, 19 nt, Artificial Sequence
  Description of Artificial Sequence:  siNA antisense region
cacgaaaaugguauccagu

SEQ ID NO: 2452 - RNA, 19 nt, Artificial Sequence
  Description of Artificial Sequence:  siNA antisense region
uauguacgacuccuaacuc

SEQ ID NO: 2453 - RNA, 19 nt, Artificial Sequence
  Description of Artificial Sequence:  siNA antisense region
guaaguuuacauccugauu

SEQ ID NO: 2454 - RNA, 19 nt, Artificial Sequence
  Description of Artificial Sequence:  siNA antisense region
aacugagacgcgagcuaug

SEQ ID NO: 2455 - RNA, 19 nt, Artificial Sequence
  Description of Artificial Sequence:  siNA antisense region
acacuaaaaguuccuugaa

SEQ ID NO: 2456 - RNA, 19 nt, Artificial Sequence
  Description of Artificial Sequence:  siNA antisense region
uagcuggaucagcagcaua

SEQ ID NO: 2457 - RNA, 19 nt, Artificial Sequence
  Description of Artificial Sequence:  siNA antisense region
ugccagaagcugcaugcau

SEQ ID NO: 2458 - RNA, 19 nt, Artificial Sequence
  Description of Artificial Sequence:  siNA antisense region
guuuaucuagcaauaaauu

SEQ ID NO: 2459 - RNA, 19 nt, Artificial Sequence
  Description of Artificial Sequence:  siNA antisense region
cugaaaagcauguagugcg

SEQ ID NO: 2460 - RNA, 19 nt, Artificial Sequence
  Description of Artificial Sequence:  siNA antisense region
uguuuguuagugcagcuac

SEQ ID NO: 2461 - RNA, 19 nt, Artificial Sequence
  Description of Artificial Sequence:  siNA antisense region
caguuugaaaagcaacauu

SEQ ID NO: 2462 - RNA, 19 nt, Artificial Sequence
  Description of Artificial Sequence:  siNA antisense region
uaaaauuaccggguuugac

SEQ ID NO: 2463 - RNA, 19 nt, Artificial Sequence
  Description of Artificial Sequence:  siNA antisense region
agucauaaaagucuuuauu

SEQ ID NO: 2464 - RNA, 19 nt, Artificial Sequence
  Description of Artificial Sequence:  siNA antisense region
aaccuuuagacacagcaaa

SEQ ID NO: 2465 - RNA, 19 nt, Artificial Sequence
  Description of Artificial Sequence:  siNA antisense region
aacuuccuuccuuaaagaa

SEQ ID NO: 2466 - RNA, 19 nt, Artificial Sequence
  Description of Artificial Sequence:  siNA antisense region
aguguuuuaguucaacaga

SEQ ID NO: 2467 - RNA, 19 nt, Artificial Sequence
  Description of Artificial Sequence:  siNA antisense region
cauccugagcaaagaagaa

SEQ ID NO: 2468 - RNA, 19 nt, Artificial Sequence
  Description of Artificial Sequence:  siNA antisense region
cacugauagcagcguugcc

SEQ ID NO: 2469 - RNA, 19 nt, Artificial Sequence
  Description of Artificial Sequence:  siNA antisense region
aacgauaauagucauaauc

SEQ ID NO: 2470 - RNA, 19 nt, Artificial Sequence
  Description of Artificial Sequence:  siNA antisense region
acauuguuggcagauuaua

SEQ ID NO: 2471 - RNA, 19 nt, Artificial Sequence
  Description of Artificial Sequence:  siNA antisense region
ggaguugucugauaucaca

SEQ ID NO: 2472 - RNA, 19 nt, Artificial Sequence
  Description of Artificial Sequence:  siNA antisense region
caacuucaacuacgaauag

SEQ ID NO: 2473 - RNA, 19 nt, Artificial Sequence
  Description of Artificial Sequence:  siNA antisense region
aaucaaaguauuuaucaac

SEQ ID NO: 2474 - RNA, 19 nt, Artificial Sequence
  Description of Artificial Sequence:  siNA antisense region
uacagccaccaucguaaca

SEQ ID NO: 2475 - RNA, 19 nt, Artificial Sequence
  Description of Artificial Sequence:  siNA antisense region
uuacuugguuggcauuaau

SEQ ID NO: 2476 - RNA, 19 nt, Artificial Sequence
  Description of Artificial Sequence:  siNA antisense region
uauccagauuguuaacgau

SEQ ID NO: 2477 - RNA, 19 nt, Artificial Sequence
  Description of Artificial Sequence:  siNA antisense region
augggaaaccagcugauuu

SEQ ID NO: 2478 - RNA, 19 nt, Artificial Sequence
  Description of Artificial Sequence:  siNA antisense region
ccuuaccccauuuauuaaa

SEQ ID NO: 2479 - RNA, 19 nt, Artificial Sequence
  Description of Artificial Sequence:  siNA antisense region
agucauaauaaagucuagc

SEQ ID NO: 2480 - RNA, 19 nt, Artificial Sequence
  Description of Artificial Sequence:  siNA antisense region
gauccucauaacucauuga

SEQ ID NO: 2481 - RNA, 19 nt, Artificial Sequence
  Description of Artificial Sequence:  siNA antisense region
acgcgaaaagugcaucuug

SEQ ID NO: 2482 - RNA, 19 nt, Artificial Sequence
  Description of Artificial Sequence:  siNA antisense region
ugacauuacgcuuaguaua

SEQ ID NO: 2483 - RNA, 19 nt, Artificial Sequence
  Description of Artificial Sequence:  siNA antisense region
uuugaguuauaguagggau

SEQ ID NO: 2484 - RNA, 19 nt, Artificial Sequence
  Description of Artificial Sequence:  siNA antisense region
uggcauacuuaagauucau

SEQ ID NO: 2485 - RNA, 19 nt, Artificial Sequence
  Description of Artificial Sequence:  siNA antisense region
cucuauucuuugcacuaau

SEQ ID NO: 2486 - RNA, 19 nt, Artificial Sequence
  Description of Artificial Sequence:  siNA antisense region
caccagcuacggugcgagc

SEQ ID NO: 2487 - RNA, 19 nt, Artificial Sequence
  Description of Artificial Sequence:  siNA antisense region
uaguacuacagauagagac

SEQ ID NO: 2488 - RNA, 19 nt, Artificial Sequence
  Description of Artificial Sequence:  siNA antisense region
gaaacugucuauuugucau

SEQ ID NO: 2489 - RNA, 19 nt, Artificial Sequence
  Description of Artificial Sequence:  siNA antisense region
acuucaauaauuucugaug

SEQ ID NO: 2490 - RNA, 19 nt, Artificial Sequence
  Description of Artificial Sequence:  siNA antisense region
cucuaguggcggcuauuga

SEQ ID NO: 2491 - RNA, 19 nt, Artificial Sequence
  Description of Artificial Sequence:  siNA antisense region
caauuaccacaguagcucc

SEQ ID NO: 2492 - RNA, 19 nt, Artificial Sequence
  Description of Artificial Sequence:  siNA antisense region
cguaaaacuugcuuguucc

SEQ ID NO: 2493 - RNA, 19 nt, Artificial Sequence
  Description of Artificial Sequence:  siNA antisense region
acauauuaugccagccacc

SEQ ID NO: 2494 - RNA, 19 nt, Artificial Sequence
  Description of Artificial Sequence:  siNA antisense region
cacuguaaacaguuuuuaa

SEQ ID NO: 2495 - RNA, 19 nt, Artificial Sequence
  Description of Artificial Sequence:  siNA antisense region
gguguggaguuucuacauc

SEQ ID NO: 2496 - RNA, 19 nt, Artificial Sequence
  Description of Artificial Sequence:  siNA antisense region
gauaaucccaacccauaag

SEQ ID NO: 2497 - RNA, 19 nt, Artificial Sequence
  Description of Artificial Sequence:  siNA antisense region
uggcucugucacauuuugg

SEQ ID NO: 2498 - RNA, 19 nt, Artificial Sequence
  Description of Artificial Sequence:  siNA antisense region
uccuaagcauguuaggcau

SEQ ID NO: 2499 - RNA, 19 nt, Artificial Sequence
  Description of Artificial Sequence:  siNA antisense region
gaacaagagaggccauuau

SEQ ID NO: 2500 - RNA, 19 nt, Artificial Sequence
  Description of Artificial Sequence:  siNA antisense region
uguuauguuugcgagcaag

SEQ ID NO: 2501 - RNA, 19 nt, Artificial Sequence
  Description of Artificial Sequence:  siNA antisense region
gugauaaguuacagcaagu

SEQ ID NO: 2502 - RNA, 19 nt, Artificial Sequence
  Description of Artificial Sequence:  siNA antisense region
cuaaccuguagaaacggug

SEQ ID NO: 2503 - RNA, 19 nt, Artificial Sequence
  Description of Artificial Sequence:  siNA antisense region
cuugcgcacacucguuagc

SEQ ID NO: 2504 - RNA, 19 nt, Artificial Sequence
  Description of Artificial Sequence:  siNA antisense region
ugaccaucucacuuaauac

SEQ ID NO: 2505 - RNA, 19 nt, Artificial Sequence
  Description of Artificial Sequence:  siNA antisense region
auagugagccgccacacau

SEQ ID NO: 2506 - RNA, 19 nt, Artificial Sequence
  Description of Artificial Sequence:  siNA antisense region
uuccaccugguuuaacaua

SEQ ID NO: 2507 - RNA, 19 nt, Artificial Sequence
  Description of Artificial Sequence:  siNA antisense region
uagcaucaccggaugaugu

SEQ ID NO: 2508 - RNA, 19 nt, Artificial Sequence
  Description of Artificial Sequence:  siNA antisense region
uauuagcauaagcaguugu

SEQ ID NO: 2509 - RNA, 19 nt, Artificial Sequence
  Description of Artificial Sequence:  siNA antisense region
gacaaauguuaaagacacu

SEQ ID NO: 2510 - RNA, 19 nt, Artificial Sequence
  Description of Artificial Sequence:  siNA antisense region
cauuggcuguaacagcuug

SEQ ID NO: 2511 - RNA, 19 nt, Artificial Sequence
  Description of Artificial Sequence:  siNA antisense region
uugaaagaagugcauuuac

SEQ ID NO: 2512 - RNA, 19 nt, Artificial Sequence
  Description of Artificial Sequence:  siNA antisense region
cuaucuuauuaccaucagu

SEQ ID NO: 2513 - RNA, 19 nt, Artificial Sequence
  Description of Artificial Sequence:  siNA antisense region
ugcggacauacuugucagc

SEQ ID NO: 2514 - RNA, 19 nt, Artificial Sequence
  Description of Artificial Sequence:  siNA antisense region
agagccuguguuguagauu

SEQ ID NO: 2515 - RNA, 19 nt, Artificial Sequence
  Description of Artificial Sequence:  siNA antisense region
uucuauagagacacucaua

SEQ ID NO: 2516 - RNA, 19 nt, Artificial Sequence
  Description of Artificial Sequence:  siNA antisense region
caugaucaacaucccuauu

SEQ ID NO: 2517 - RNA, 19 nt, Artificial Sequence
  Description of Artificial Sequence:  siNA antisense region
aaaacucauccacgaauuc

SEQ ID NO: 2518 - RNA, 19 nt, Artificial Sequence
  Description of Artificial Sequence:  siNA antisense region
guuuacgcagguaagcgua

SEQ ID NO: 2519 - RNA, 19 nt, Artificial Sequence
  Description of Artificial Sequence:  siNA antisense region
gaaucaucauggagaaaug

SEQ ID NO: 2520 - RNA, 19 nt, Artificial Sequence
  Description of Artificial Sequence:  siNA antisense region
caacggcaucaucagaaag

SEQ ID NO: 2521 - RNA, 19 nt, Artificial Sequence
  Description of Artificial Sequence:  siNA antisense region
aguuacuguuauagcacac

SEQ ID NO: 2522 - RNA, 19 nt, Artificial Sequence
  Description of Artificial Sequence:  siNA antisense region
cuaaaccuugagccgcaua

SEQ ID NO: 2523 - RNA, 19 nt, Artificial Sequence
  Description of Artificial Sequence:  siNA antisense region
aguucuuaaugcuagcuac

SEQ ID NO: 2524 - RNA, 19 nt, Artificial Sequence
  Description of Artificial Sequence:  siNA antisense region
aauaaagaacugccuuaaa

SEQ ID NO: 2525 - RNA, 19 nt, Artificial Sequence
  Description of Artificial Sequence:  siNA antisense region
ugaacacauuauuuugaua

SEQ ID NO: 2526 - RNA, 19 nt, Artificial Sequence
  Description of Artificial Sequence:  siNA antisense region
aacauuuugccucagacau

SEQ ID NO: 2527 - RNA, 19 nt, Artificial Sequence
  Description of Artificial Sequence:  siNA antisense region
uaaggucagucucagucca

SEQ ID NO: 2528 - RNA, 19 nt, Artificial Sequence
  Description of Artificial Sequence:  siNA antisense region
auucgugagguccuuuagu

SEQ ID NO: 2529 - RNA, 19 nt, Artificial Sequence
  Description of Artificial Sequence:  siNA antisense region
uuguaugcugugagcaaaa

SEQ ID NO: 2530 - RNA, 19 nt, Artificial Sequence
  Description of Artificial Sequence:  siNA antisense region
cuccuuguuuaacuagcau

SEQ ID NO: 2531 - RNA, 19 nt, Artificial Sequence
  Description of Artificial Sequence:  siNA antisense region
gcagguacacguaaucauc

SEQ ID NO: 2532 - RNA, 19 nt, Artificial Sequence
  Description of Artificial Sequence:  siNA antisense region
uugauggaucuggguaagg

SEQ ID NO: 2533 - RNA, 19 nt, Artificial Sequence
  Description of Artificial Sequence:  siNA antisense region
agccugcgccuaauauucu

SEQ ID NO: 2534 - RNA, 19 nt, Artificial Sequence
  Description of Artificial Sequence:  siNA antisense region
caauaucaucgacaaaaca

SEQ ID NO: 2535 - RNA, 19 nt, Artificial Sequence
  Description of Artificial Sequence:  siNA antisense region
guguaccaucuguuuugac

SEQ ID NO: 2536 - RNA, 19 nt, Artificial Sequence
  Description of Artificial Sequence:  siNA antisense region
cgaaccuuucaaucauaag

SEQ ID NO: 2537 - RNA, 19 nt, Artificial Sequence
  Description of Artificial Sequence:  siNA antisense region
caucaauagccagugacac

SEQ ID NO: 2538 - RNA, 19 nt, Artificial Sequence
  Description of Artificial Sequence:  siNA antisense region
guuuuguaaguggguaagc

SEQ ID NO: 2539 - RNA, 19 nt, Artificial Sequence
  Description of Artificial Sequence:  siNA antisense region
cauacuccugauuaggaug

SEQ ID NO: 2540 - RNA, 19 nt, Artificial Sequence
  Description of Artificial Sequence:  siNA antisense region
acaagugaaagacaucagc

SEQ ID NO: 2541 - RNA, 19 nt, Artificial Sequence
  Description of Artificial Sequence:  siNA antisense region
uucuaauguauuguaaaua

SEQ ID NO: 2542 - RNA, 19 nt, Artificial Sequence
  Description of Artificial Sequence:  siNA antisense region
uaagcucaucauguaacuu

SEQ ID NO: 2543 - RNA, 19 nt, Artificial Sequence
  Description of Artificial Sequence:  siNA antisense region
uguccaacauguggccagu

SEQ ID NO: 2544 - RNA, 19 nt, Artificial Sequence
  Description of Artificial Sequence:  siNA antisense region
uuagcauuacggaauacau

SEQ ID NO: 2545 - RNA, 19 nt, Artificial Sequence
  Description of Artificial Sequence:  siNA antisense region
gugagguguuaucauuagu

SEQ ID NO: 2546 - RNA, 19 nt, Artificial Sequence
  Description of Artificial Sequence:  siNA antisense region
acucagguucccaguaccg

SEQ ID NO: 2547 - RNA, 19 nt, Artificial Sequence
  Description of Artificial Sequence:  siNA antisense region
uguacauagccucauaaaa

SEQ ID NO: 2548 - RNA, 19 nt, Artificial Sequence
  Description of Artificial Sequence:  siNA antisense region
gcaagacuguauguggugu

SEQ ID NO: 2549 - RNA, 19 nt, Artificial Sequence
  Description of Artificial Sequence:  siNA antisense region
cacaagcaccuacagccug

SEQ ID NO: 2550 - RNA, 19 nt, Artificial Sequence
  Description of Artificial Sequence:  siNA antisense region
ucugugaauugcacaauac

SEQ ID NO: 2551 - RNA, 19 nt, Artificial Sequence
  Description of Artificial Sequence:  siNA antisense region
caccgcaacgaagugaagu

SEQ ID NO: 2552 - RNA, 19 nt, Artificial Sequence
  Description of Artificial Sequence:  siNA antisense region
auggucuccuaauacaggc

SEQ ID NO: 2553 - RNA, 19 nt, Artificial Sequence
  Description of Artificial Sequence:  siNA antisense region
agcacuugcaacauaggaa

SEQ ID NO: 2554 - RNA, 19 nt, Artificial Sequence
  Description of Artificial Sequence:  siNA antisense region
aaaugacauggucauagca

SEQ ID NO: 2555 - RNA, 19 nt, Artificial Sequence
  Description of Artificial Sequence:  siNA antisense region
cuaauuugugugauguuga

SEQ ID NO: 2556 - RNA, 19 nt, Artificial Sequence
  Description of Artificial Sequence:  siNA antisense region
agggauuaacagacaacac

SEQ ID NO: 2557 - RNA, 19 nt, Artificial Sequence
  Description of Artificial Sequence:  siNA antisense region
cuggggcauugcaaacaua

SEQ ID NO: 2558 - RNA, 19 nt, Artificial Sequence
  Description of Artificial Sequence:  siNA antisense region
caucagugacaucacaacc

SEQ ID NO: 2559 - RNA, 19 nt, Artificial Sequence
  Description of Artificial Sequence:  siNA antisense region
cuagauacaguugugucac

SEQ ID NO: 2560 - RNA, 19 nt, Artificial Sequence
  Description of Artificial Sequence:  siNA antisense region
aauaauagcucauaccucc

SEQ ID NO: 2561 - RNA, 19 nt, Artificial Sequence
  Description of Artificial Sequence:  siNA antisense region
gaggcuuaugugacuugca

SEQ ID NO: 2562 - RNA, 19 nt, Artificial Sequence
  Description of Artificial Sequence:  siNA antisense region
auaauggaaaacuaauggg

SEQ ID NO: 2563 - RNA, 19 nt, Artificial Sequence
  Description of Artificial Sequence:  siNA antisense region
aaaccugaccauuagcaca

SEQ ID NO: 2564 - RNA, 19 nt, Artificial Sequence
  Description of Artificial Sequence:  siNA antisense region
uguuuuuguauaaaccaaa

SEQ ID NO: 2565 - RNA, 19 nt, Artificial Sequence
  Description of Artificial Sequence:  siNA antisense region
ugucacugccuacacaugu

SEQ ID NO: 2566 - RNA, 19 nt, Artificial Sequence
  Description of Artificial Sequence:  siNA antisense region
cauugaagucagugacauu

SEQ ID NO: 2567 - RNA, 19 nt, Artificial Sequence
  Description of Artificial Sequence:  siNA antisense region
aaucacauguugcuaucgc

SEQ ID NO: 2568 - RNA, 19 nt, Artificial Sequence
  Description of Artificial Sequence:  siNA antisense region
aaucgccagcauuagucca

SEQ ID NO: 2569 - RNA, 19 nt, Artificial Sequence
  Description of Artificial Sequence:  siNA antisense region
aaguguuggcaaguaugua

SEQ ID NO: 2570 - RNA, 19 nt, Artificial Sequence
  Description of Artificial Sequence:  siNA antisense region
gcuugagucucucaguaca

SEQ ID NO: 2571 - RNA, 19 nt, Artificial Sequence
  Description of Artificial Sequence:  siNA antisense region
gcguuucugcugcgaaaag

SEQ ID NO: 2572 - RNA, 19 nt, Artificial Sequence
  Description of Artificial Sequence:  siNA antisense region
uuuccucaguggcuuugag

SEQ ID NO: 2573 - RNA, 19 nt, Artificial Sequence
  Description of Artificial Sequence:  siNA antisense region
cauaugacagcuuaaaugu

SEQ ID NO: 2574 - RNA, 19 nt, Artificial Sequence
  Description of Artificial Sequence:  siNA antisense region
cgcguacaguggcaauacc

SEQ ID NO: 2575 - RNA, 19 nt, Artificial Sequence
  Description of Artificial Sequence:  siNA antisense region
cucugucagagaguacuuc

SEQ ID NO: 2576 - RNA, 19 nt, Artificial Sequence
  Description of Artificial Sequence:  siNA antisense region
cccaugaaagaugcaauuc

SEQ ID NO: 2577 - RNA, 19 nt, Artificial Sequence
  Description of Artificial Sequence:  siNA antisense region
gucuagguuuuccaaccuc

SEQ ID NO: 2578 - RNA, 19 nt, Artificial Sequence
  Description of Artificial Sequence:  siNA antisense region
aguuucuguucaauggugg

SEQ ID NO: 2579 - RNA, 19 nt, Artificial Sequence
  Description of Artificial Sequence:  siNA antisense region
gguaaccaguaaagacaua

SEQ ID NO: 2580 - RNA, 19 nt, Artificial Sequence
  Description of Artificial Sequence:  siNA antisense region
uacuauuuuuaguuacacg

SEQ ID NO: 2581 - RNA, 19 nt, Artificial Sequence
  Description of Artificial Sequence:  siNA antisense region
acucuccaaucuguacuuu

SEQ ID NO: 2582 - RNA, 19 nt, Artificial Sequence
  Description of Artificial Sequence:  siNA antisense region
caccuuuuucaaaggugua

SEQ ID NO: 2583 - RNA, 19 nt, Artificial Sequence
  Description of Artificial Sequence:  siNA antisense region
caacagcaucaccauaguc

SEQ ID NO: 2584 - RNA, 19 nt, Artificial Sequence
  Description of Artificial Sequence:  siNA antisense region
ucguaguaccucuguacac

SEQ ID NO: 2585 - RNA, 19 nt, Artificial Sequence
  Description of Artificial Sequence:  siNA antisense region
caacauucaacuuguaugu

SEQ ID NO: 2586 - RNA, 19 nt, Artificial Sequence
  Description of Artificial Sequence:  siNA antisense region
ucaacacaaaguaaucacc

SEQ ID NO: 2587 - RNA, 19 nt, Artificial Sequence
  Description of Artificial Sequence:  siNA antisense region
gcauuacagugugagaugu

SEQ ID NO: 2588 - RNA, 19 nt, Artificial Sequence
  Description of Artificial Sequence:  siNA antisense region
gaguaggugcacuaagugg

SEQ ID NO: 2589 - RNA, 19 nt, Artificial Sequence
  Description of Artificial Sequence:  siNA antisense region
agugcucuuguggcacuag

SEQ ID NO: 2590 - RNA, 19 nt, Artificial Sequence
  Description of Artificial Sequence:  siNA antisense region
agccaguaauucucacaua

SEQ ID NO: 2591 - RNA, 19 nt, Artificial Sequence
  Description of Artificial Sequence:  siNA antisense region
uguugaguguuggguacaa

SEQ ID NO: 2592 - RNA, 19 nt, Artificial Sequence
  Description of Artificial Sequence:  siNA antisense region
uagaaaacucaucugagau

SEQ ID NO: 2593 - RNA, 19 nt, Artificial Sequence
  Description of Artificial Sequence:  siNA antisense region
gauaauuugcaacauugcu

SEQ ID NO: 2594 - RNA, 19 nt, Artificial Sequence
  Description of Artificial Sequence:  siNA antisense region
uuugcaugccgaccuuuug

SEQ ID NO: 2595 - RNA, 19 nt, Artificial Sequence
  Description of Artificial Sequence:  siNA antisense region
cuuggaguguagaguacuu

SEQ ID NO: 2596 - RNA, 19 nt, Artificial Sequence
  Description of Artificial Sequence:  siNA antisense region
uaccaguaccagguggucc

SEQ ID NO: 2597 - RNA, 19 nt, Artificial Sequence
  Description of Artificial Sequence:  siNA antisense region
cgauggcaaaaugacucuu

SEQ ID NO: 2598 - RNA, 19 nt, Artificial Sequence
  Description of Artificial Sequence:  siNA antisense region
gguaauagagagcaagucc

SEQ ID NO: 2599 - RNA, 19 nt, Artificial Sequence
  Description of Artificial Sequence:  siNA antisense region
acacuaugcgagcagaugg

SEQ ID NO: 2600 - RNA, 19 nt, Artificial Sequence
  Description of Artificial Sequence:  siNA antisense region
caugagagcaugccguaua

SEQ ID NO: 2601 - RNA, 19 nt, Artificial Sequence
  Description of Artificial Sequence:  siNA antisense region
auagggcaucaacagcugc

SEQ ID NO: 2602 - RNA, 19 nt, Artificial Sequence
  Description of Artificial Sequence:  siNA antisense region
auuuuaaugccuuuucaca

SEQ ID NO: 2603 - RNA, 19 nt, Artificial Sequence
  Description of Artificial Sequence:  siNA antisense region
auuuaucuaugggcaaaua

SEQ ID NO: 2604 - RNA, 19 nt, Artificial Sequence
  Description of Artificial Sequence:  siNA antisense region
cagguaugauucuacuaca

SEQ ID NO: 2605 - RNA, 19 nt, Artificial Sequence
  Description of Artificial Sequence:  siNA antisense region
acucuacgcgcgcacgcgc

SEQ ID NO: 2606 - RNA, 19 nt, Artificial Sequence
  Description of Artificial Sequence:  siNA antisense region
cuuugaauuuaucaaaaca

SEQ ID NO: 2607 - RNA, 19 nt, Artificial Sequence
  Description of Artificial Sequence:  siNA antisense region
guucuaguguugaauucac

SEQ ID NO: 2608 - RNA, 19 nt, Artificial Sequence
  Description of Artificial Sequence:  siNA antisense region
cagugcagaaaacauacug

SEQ ID NO: 2609 - RNA, 19 nt, Artificial Sequence
  Description of Artificial Sequence:  siNA antisense region
uuucuggcaaugcauuuac

SEQ ID NO: 2610 - RNA, 19 nt, Artificial Sequence
  Description of Artificial Sequence:  siNA antisense region
cuacaaugucagcaguugu

SEQ ID NO: 2611 - RNA, 19 nt, Artificial Sequence
  Description of Artificial Sequence:  siNA antisense region
uagagauuucaucaaagac

SEQ ID NO: 2612 - RNA, 19 nt, Artificial Sequence
  Description of Artificial Sequence:  siNA antisense region
agucauaauuaguagccau

SEQ ID NO: 2613 - RNA, 19 nt, Artificial Sequence
  Description of Artificial Sequence:  siNA antisense region
uagcauugacaacacucaa

SEQ ID NO: 2614 - RNA, 19 nt, Artificial Sequence
  Description of Artificial Sequence:  siNA antisense region
aguguuuugcacgaagucu

SEQ ID NO: 2615 - RNA, 19 nt, Artificial Sequence
  Description of Artificial Sequence:  siNA antisense region
gaucgccaauauagacgua

SEQ ID NO: 2616 - RNA, 19 nt, Artificial Sequence
  Description of Artificial Sequence:  siNA antisense region
gggcugguaauugagcagg

SEQ ID NO: 2617 - RNA, 19 nt, Artificial Sequence
  Description of Artificial Sequence:  siNA antisense region
uagucagcaaugugcgggg

SEQ ID NO: 2618 - RNA, 19 nt, Artificial Sequence
  Description of Artificial Sequence:  siNA antisense region
cugguucuagugugccuuu

SEQ ID NO: 2619 - RNA, 19 nt, Artificial Sequence
  Description of Artificial Sequence:  siNA antisense region
acacugaauuaaaauauuc

SEQ ID NO: 2620 - RNA, 19 nt, Artificial Sequence
  Description of Artificial Sequence:  siNA antisense region
uuguuuucauaagucugca

SEQ ID NO: 2621 - RNA, 19 nt, Artificial Sequence
  Description of Artificial Sequence:  siNA antisense region
ggaacaugucuggaccuau

SEQ ID NO: 2622 - RNA, 19 nt, Artificial Sequence
  Description of Artificial Sequence:  siNA antisense region
aacggcgacaaguuccaag

SEQ ID NO: 2623 - RNA, 19 nt, Artificial Sequence
  Description of Artificial Sequence:  siNA antisense region
caacaauuucagcaggaca

SEQ ID NO: 2624 - RNA, 19 nt, Artificial Sequence
  Description of Artificial Sequence:  siNA antisense region
cuaaagcacucacaguguc

SEQ ID NO: 2625 - RNA, 19 nt, Artificial Sequence
  Description of Artificial Sequence:  siNA antisense region
uuagcuuauugucauaaac

SEQ ID NO: 2626 - RNA, 19 nt, Artificial Sequence
  Description of Artificial Sequence:  siNA antisense region
acuuauccuugugugcuuu

SEQ ID NO: 2627 - RNA, 19 nt, Artificial Sequence
  Description of Artificial Sequence:  siNA antisense region
uuuugaagcauugagcuga

SEQ ID NO: 2628 - RNA, 19 nt, Artificial Sequence
  Description of Artificial Sequence:  siNA antisense region
uaacaccuuuguagaacau

SEQ ID NO: 2629 - RNA, 19 nt, Artificial Sequence
  Description of Artificial Sequence:  siNA antisense region
augaaacaucauguguaau

SEQ ID NO: 2630 - RNA, 19 nt, Artificial Sequence
  Description of Artificial Sequence:  siNA antisense region
gaggucuguugauugcaga

SEQ ID NO: 2631 - RNA, 19 nt, Artificial Sequence
  Description of Artificial Sequence:  siNA antisense region
cucuuacaacgccuauuug

SEQ ID NO: 2632 - RNA, 19 nt, Artificial Sequence
  Description of Artificial Sequence:  siNA antisense region
gauugcguguaagaaauuc

SEQ ID NO: 2633 - RNA, 19 nt, Artificial Sequence
  Description of Artificial Sequence:  siNA antisense region
cagcuuuucuccaagcagg

SEQ ID NO: 2634 - RNA, 19 nt, Artificial Sequence
  Description of Artificial Sequence:  siNA antisense region
uauaaggugagauaaaaac

SEQ ID NO: 2635 - RNA, 19 nt, Artificial Sequence
  Description of Artificial Sequence:  siNA antisense region
cuacagcguucugugaauu

SEQ ID NO: 2636 - RNA, 19 nt, Artificial Sequence
  Description of Artificial Sequence:  siNA antisense region
auccuaagauuuuugaagc

SEQ ID NO: 2637 - RNA, 19 nt, Artificial Sequence
  Description of Artificial Sequence:  siNA antisense region
caacagucugcguaggcaa

SEQ ID NO: 2638 - RNA, 19 nt, Artificial Sequence
  Description of Artificial Sequence:  siNA antisense region
cagaacccugugaugaauc

SEQ ID NO: 2639 - RNA, 19 nt, Artificial Sequence
  Description of Artificial Sequence:  siNA antisense region
auaugacauagucauauuc

SEQ ID NO: 2640 - RNA, 19 nt, Artificial Sequence
  Description of Artificial Sequence:  siNA antisense region
uuucaguaguuugugugaa

SEQ ID NO: 2641 - RNA, 19 nt, Artificial Sequence
  Description of Artificial Sequence:  siNA antisense region
cauuacaagagugugcugu

SEQ ID NO: 2642 - RNA, 19 nt, Artificial Sequence
  Description of Artificial Sequence:  siNA antisense region
ccacauugaagcgguugac

SEQ ID NO: 2643 - RNA, 19 nt, Artificial Sequence
  Description of Artificial Sequence:  siNA antisense region
uuuuugcccuugugauagc

SEQ ID NO: 2644 - RNA, 19 nt, Artificial Sequence
  Description of Artificial Sequence:  siNA antisense region
uuaugcacaaaaugccaau

SEQ ID NO: 2645 - RNA, 19 nt, Artificial Sequence
  Description of Artificial Sequence:  siNA antisense region
aaagaucucuaucagacau

SEQ ID NO: 2646 - RNA, 19 nt, Artificial Sequence
  Description of Artificial Sequence:  siNA antisense region
uaaauugcaguuugucaua

SEQ ID NO: 2647 - RNA, 19 nt, Artificial Sequence
  Description of Artificial Sequence:  siNA antisense region
gugguauuucuagacuugu

SEQ ID NO: 2648 - RNA, 19 nt, Artificial Sequence
  Description of Artificial Sequence:  siNA antisense region
auguagccacauugcgacg

SEQ ID NO: 2649 - RNA, 19 nt, Artificial Sequence
  Description of Artificial Sequence:  siNA antisense region
uuacauuuucugcuuguaa

SEQ ID NO: 2650 - RNA, 19 nt, Artificial Sequence
  Description of Artificial Sequence:  siNA antisense region
aguccuuaaaaaguccagu

SEQ ID NO: 2651 - RNA, 19 nt, Artificial Sequence
  Description of Artificial Sequence:  siNA antisense region
caguaaugaucuuacuaca

SEQ ID NO: 2652 - RNA, 19 nt, Artificial Sequence
  Description of Artificial Sequence:  siNA antisense region
ccuguguaggaugaagacc

SEQ ID NO: 2653 - RNA, 19 nt, Artificial Sequence
  Description of Artificial Sequence:  siNA antisense region
cgcugagguguguaggugc

SEQ ID NO: 2654 - RNA, 19 nt, Artificial Sequence
  Description of Artificial Sequence:  siNA antisense region
ucuugaacuuuauaucaac

SEQ ID NO: 2655 - RNA, 19 nt, Artificial Sequence
  Description of Artificial Sequence:  siNA antisense region
caacacauaauccuucagu

SEQ ID NO: 2656 - RNA, 19 nt, Artificial Sequence
  Description of Artificial Sequence:  siNA antisense region
uugguaugccugguauguc

SEQ ID NO: 2657 - RNA, 19 nt, Artificial Sequence
  Description of Artificial Sequence:  siNA antisense region
uacgguaggucauguccuu

SEQ ID NO: 2658 - RNA, 19 nt, Artificial Sequence
  Description of Artificial Sequence:  siNA antisense region
ccaucauagagaugagucu

SEQ ID NO: 2659 - RNA, 19 nt, Artificial Sequence
  Description of Artificial Sequence:  siNA antisense region
gguaauucauuuugaaacc

SEQ ID NO: 2660 - RNA, 19 nt, Artificial Sequence
  Description of Artificial Sequence:  siNA antisense region
uaggguaaccauugacuug

SEQ ID NO: 2661 - RNA, 19 nt, Artificial Sequence
  Description of Artificial Sequence:  siNA antisense region
cgcgggugauaaacauauu

SEQ ID NO: 2662 - RNA, 19 nt, Artificial Sequence
  Description of Artificial Sequence:  siNA antisense region
cgugacgaauagcuucuuc

SEQ ID NO: 2663 - RNA, 19 nt, Artificial Sequence
  Description of Artificial Sequence:  siNA antisense region
agccaauccacgcacgaac

SEQ ID NO: 2664 - RNA, 19 nt, Artificial Sequence
  Description of Artificial Sequence:  siNA antisense region
gacagcccucuacaucaaa

SEQ ID NO: 2665 - RNA, 19 nt, Artificial Sequence
  Description of Artificial Sequence:  siNA antisense region
cagcaucucuaguugcaug

SEQ ID NO: 2666 - RNA, 19 nt, Artificial Sequence
  Description of Artificial Sequence:  siNA antisense region
gagguagguuaguacccac

SEQ ID NO: 2667 - RNA, 19 nt, Artificial Sequence
  Description of Artificial Sequence:  siNA antisense region
uagaaaauccuagcuggag

SEQ ID NO: 2668 - RNA, 19 nt, Artificial Sequence
  Description of Artificial Sequence:  siNA antisense region
cuacuaaguuaacaccugu

SEQ ID NO: 2669 - RNA, 19 nt, Artificial Sequence
  Description of Artificial Sequence:  siNA antisense region
cauaaccagucgguacagc

SEQ ID NO: 2670 - RNA, 19 nt, Artificial Sequence
  Description of Artificial Sequence:  siNA antisense region
uguuauuuucagugucaac

SEQ ID NO: 2671 - RNA, 19 nt, Artificial Sequence
  Description of Artificial Sequence:  siNA antisense region
uaacucuggugaauucugu

SEQ ID NO: 2672 - RNA, 19 nt, Artificial Sequence
  Description of Artificial Sequence:  siNA antisense region
cugguggagguuuugcauu

SEQ ID NO: 2673 - RNA, 19 nt, Artificial Sequence
  Description of Artificial Sequence:  siNA antisense region
gauguuuaaacuggucacc

SEQ ID NO: 2674 - RNA, 19 nt, Artificial Sequence
  Description of Artificial Sequence:  siNA antisense region
uauacaugagugguauaag

SEQ ID NO: 2675 - RNA, 19 nt, Artificial Sequence
  Description of Artificial Sequence:  siNA antisense region
cauuccagggcaagccuuu

SEQ ID NO: 2676 - RNA, 19 nt, Artificial Sequence
  Description of Artificial Sequence:  siNA antisense region
cuaucuuaauacgcacuac

SEQ ID NO: 2677 - RNA, 19 nt, Artificial Sequence
  Description of Artificial Sequence:  siNA antisense region
uaucacugagcauuuguac

SEQ ID NO: 2678 - RNA, 19 nt, Artificial Sequence
  Description of Artificial Sequence:  siNA antisense region
cugacaauccuuucagugu

SEQ ID NO: 2679 - RNA, 19 nt, Artificial Sequence
  Description of Artificial Sequence:  siNA antisense region
ggacgaacacgacucuguc

SEQ ID NO: 2680 - RNA, 19 nt, Artificial Sequence
  Description of Artificial Sequence:  siNA antisense region
caaagccaugcgcccaaag

SEQ ID NO: 2681 - RNA, 19 nt, Artificial Sequence
  Description of Artificial Sequence:  siNA antisense region
acuucauugauguaagcuc

SEQ ID NO: 2682 - RNA, 19 nt, Artificial Sequence
  Description of Artificial Sequence:  siNA antisense region
guccaaucuugacaaagua

SEQ ID NO: 2683 - RNA, 19 nt, Artificial Sequence
  Description of Artificial Sequence:  siNA antisense region
gacaacacguucuuucagg

SEQ ID NO: 2684 - RNA, 19 nt, Artificial Sequence
  Description of Artificial Sequence:  siNA antisense region
uugcacguuugucacacag

SEQ ID NO: 2685 - RNA, 19 nt, Artificial Sequence
  Description of Artificial Sequence:  siNA antisense region
augaaguagaaaagcaagu

SEQ ID NO: 2686 - RNA, 19 nt, Artificial Sequence
  Description of Artificial Sequence:  siNA antisense region
agcaggcauaaguaucuga

SEQ ID NO: 2687 - RNA, 19 nt, Artificial Sequence
  Description of Artificial Sequence:  siNA antisense region
aacccacagaaugauucca

SEQ ID NO: 2688 - RNA, 19 nt, Artificial Sequence
  Description of Artificial Sequence:  siNA antisense region
gguuauagacauagucaaa

SEQ ID NO: 2689 - RNA, 19 nt, Artificial Sequence
  Description of Artificial Sequence:  siNA antisense region
gaacaucaaucauaaaugg

SEQ ID NO: 2690 - RNA, 19 nt, Artificial Sequence
  Description of Artificial Sequence:  siNA antisense region
ccguaaagccccacugcug

SEQ ID NO: 2691 - RNA, 19 nt, Artificial Sequence
  Description of Artificial Sequence:  siNA antisense region
gguuacucugaagguuacc

SEQ ID NO: 2692 - RNA, 19 nt, Artificial Sequence
  Description of Artificial Sequence:  siNA antisense region
ccuggcaauguuggucaug

SEQ ID NO: 2693 - RNA, 19 nt, Artificial Sequence
  Description of Artificial Sequence:  siNA antisense region
caugugcauuuccauguac

SEQ ID NO: 2694 - RNA, 19 nt, Artificial Sequence
  Description of Artificial Sequence:  siNA antisense region
uagcaucacaacuagccac

SEQ ID NO: 2695 - RNA, 19 nt, Artificial Sequence
  Description of Artificial Sequence:  siNA antisense region
cuaaacaucuagucaugau

SEQ ID NO: 2696 - RNA, 19 nt, Artificial Sequence
  Description of Artificial Sequence:  siNA antisense region
caaagcacucauggacugc

SEQ ID NO: 2697 - RNA, 19 nt, Artificial Sequence
  Description of Artificial Sequence:  siNA antisense region
accaaucaacgcgcuuaac

SEQ ID NO: 2698 - RNA, 19 nt, Artificial Sequence
  Description of Artificial Sequence:  siNA antisense region
uaauaggguauucaacaga

SEQ ID NO: 2699 - RNA, 19 nt, Artificial Sequence
  Description of Artificial Sequence:  siNA antisense region
cccucaguucaucuccuau

SEQ ID NO: 2700 - RNA, 19 nt, Artificial Sequence
  Description of Artificial Sequence:  siNA antisense region
uucugcaagcagaauuaac

SEQ ID NO: 2701 - RNA, 19 nt, Artificial Sequence
  Description of Artificial Sequence:  siNA antisense region
caaccauguguuguacuuu

SEQ ID NO: 2702 - RNA, 19 nt, Artificial Sequence
  Description of Artificial Sequence:  siNA antisense region
caagcaaugcagacuucac

SEQ ID NO: 2703 - RNA, 19 nt, Artificial Sequence
  Description of Artificial Sequence:  siNA antisense region
gaacuggaaacuuaucagc

SEQ ID NO: 2704 - RNA, 19 nt, Artificial Sequence
  Description of Artificial Sequence:  siNA antisense region
gauuuccaaugucaugaag

SEQ ID NO: 2705 - RNA, 19 nt, Artificial Sequence
  Description of Artificial Sequence:  siNA antisense region
cacacuugauagccuuugg

SEQ ID NO: 2706 - RNA, 19 nt, Artificial Sequence
  Description of Artificial Sequence:  siNA antisense region
cuacuucagccugaggcac

SEQ ID NO: 2707 - RNA, 19 nt, Artificial Sequence
  Description of Artificial Sequence:  siNA antisense region
caucguagaacuuccauuc

SEQ ID NO: 2708 - RNA, 19 nt, Artificial Sequence
  Description of Artificial Sequence:  siNA antisense region
ugucacuacauggcugagc

SEQ ID NO: 2709 - RNA, 19 nt, Artificial Sequence
  Description of Artificial Sequence:  siNA antisense region
ccucuauuuuguaagcuuu

SEQ ID NO: 2710 - RNA, 19 nt, Artificial Sequence
  Description of Artificial Sequence:  siNA antisense region
cauaagaauagaagaguuc

SEQ ID NO: 2711 - RNA, 19 nt, Artificial Sequence
  Description of Artificial Sequence:  siNA antisense region
auuuaucgugauguguagc

SEQ ID NO: 2712 - RNA, 19 nt, Artificial Sequence
  Description of Artificial Sequence:  siNA antisense region
aacaaacaccaucagugaa

SEQ ID NO: 2713 - RNA, 19 nt, Artificial Sequence
  Description of Artificial Sequence:  siNA antisense region
cguuacaauuccaaaacaa

SEQ ID NO: 2714 - RNA, 19 nt, Artificial Sequence
  Description of Artificial Sequence:  siNA antisense region
uggcuggguaacgaucaac

SEQ ID NO: 2715 - RNA, 19 nt, Artificial Sequence
  Description of Artificial Sequence:  siNA antisense region
accuacacacaauugcauu

SEQ ID NO: 2716 - RNA, 19 nt, Artificial Sequence
  Description of Artificial Sequence:  siNA antisense region
acaagacucuugugucaaa

SEQ ID NO: 2717 - RNA, 19 nt, Artificial Sequence
  Description of Artificial Sequence:  siNA antisense region
cugguaaguucaaguuuga

SEQ ID NO: 2718 - RNA, 19 nt, Artificial Sequence
  Description of Artificial Sequence:  siNA antisense region
aacuaccaccaucacagcc

SEQ ID NO: 2719 - RNA, 19 nt, Artificial Sequence
  Description of Artificial Sequence:  siNA antisense region
caugcuuauucacauacaa

SEQ ID NO: 2720 - RNA, 19 nt, Artificial Sequence
  Description of Artificial Sequence:  siNA antisense region
aagcuggaguguggaaugc

SEQ ID NO: 2721 - RNA, 19 nt, Artificial Sequence
  Description of Artificial Sequence:  siNA antisense region
uaaaugcacuuuuaucgaa

SEQ ID NO: 2722 - RNA, 19 nt, Artificial Sequence
  Description of Artificial Sequence:  siNA antisense region
gcaauugcuuuaaauuagu

SEQ ID NO: 2723 - RNA, 19 nt, Artificial Sequence
  Description of Artificial Sequence:  siNA antisense region
cagaauaguaaaagaaagg

SEQ ID NO: 2724 - RNA, 19 nt, Artificial Sequence
  Description of Artificial Sequence:  siNA antisense region
gagacucacaaggacuauc

SEQ ID NO: 2725 - RNA, 19 nt, Artificial Sequence
  Description of Artificial Sequence:  siNA antisense region
acacuacuuguuugccaug

SEQ ID NO: 2726 - RNA, 19 nt, Artificial Sequence
  Description of Artificial Sequence:  siNA antisense region
gaacauaaucaauauccga

SEQ ID NO: 2727 - RNA, 19 nt, Artificial Sequence
  Description of Artificial Sequence:  siNA antisense region
acguagcagauuugagugg

SEQ ID NO: 2728 - RNA, 19 nt, Artificial Sequence
  Description of Artificial Sequence:  siNA antisense region
aauugcaucguguaauaca

SEQ ID NO: 2729 - RNA, 19 nt, Artificial Sequence
  Description of Artificial Sequence:  siNA antisense region
ugcaaacagcaccaccuaa

SEQ ID NO: 2730 - RNA, 19 nt, Artificial Sequence
  Description of Artificial Sequence:  siNA antisense region
acucauuugcauggugucu

SEQ ID NO: 2731 - RNA, 19 nt, Artificial Sequence
  Description of Artificial Sequence:  siNA antisense region
cauccaaguacugucggua

SEQ ID NO: 2732 - RNA, 19 nt, Artificial Sequence
  Description of Artificial Sequence:  siNA antisense region
aaaucaucauauuauaugc

SEQ ID NO: 2733 - RNA, 19 nt, Artificial Sequence
  Description of Artificial Sequence:  siNA antisense region
auaggcuaaauccagcaga

SEQ ID NO: 2734 - RNA, 19 nt, Artificial Sequence
  Description of Artificial Sequence:  siNA antisense region
caaauuguuuguaaaucca

SEQ ID NO: 2735 - RNA, 19 nt, Artificial Sequence
  Description of Artificial Sequence:  siNA antisense region
uccacagguuauaaguauc

SEQ ID NO: 2736 - RNA, 19 nt, Artificial Sequence
  Description of Artificial Sequence:  siNA antisense region
guaaccugguaaauguauu

SEQ ID NO: 2737 - RNA, 19 nt, Artificial Sequence
  Description of Artificial Sequence:  siNA antisense region
ccacauuuucuaaacucug

SEQ ID NO: 2738 - RNA, 19 nt, Artificial Sequence
  Description of Artificial Sequence:  siNA antisense region
uauuaacaacauuauaagc

SEQ ID NO: 2739 - RNA, 19 nt, Artificial Sequence
  Description of Artificial Sequence:  siNA antisense region
guccaucaaaguguccuuu

SEQ ID NO: 2740 - RNA, 19 nt, Artificial Sequence
  Description of Artificial Sequence:  siNA antisense region
caggugcuucgccggcgug

SEQ ID NO: 2741 - RNA, 19 nt, Artificial Sequence
  Description of Artificial Sequence:  siNA antisense region
cauuauuaaugauggaaac

SEQ ID NO: 2742 - RNA, 19 nt, Artificial Sequence
  Description of Artificial Sequence:  siNA antisense region
cuaccuuuguguaaacagc

SEQ ID NO: 2743 - RNA, 19 nt, Artificial Sequence
  Description of Artificial Sequence:  siNA antisense region
ucuccacaucaauaccauc

SEQ ID NO: 2744 - RNA, 19 nt, Artificial Sequence
  Description of Artificial Sequence:  siNA antisense region
uugucuuauuuucaaagau

SEQ ID NO: 2745 - RNA, 19 nt, Artificial Sequence
  Description of Artificial Sequence:  siNA antisense region
caacauuaacaggaagugu

SEQ ID NO: 2746 - RNA, 19 nt, Artificial Sequence
  Description of Artificial Sequence:  siNA antisense region
uagcccaaagcucaaaugc

SEQ ID NO: 2747 - RNA, 19 nt, Artificial Sequence
  Description of Artificial Sequence:  siNA antisense region
cugguuuaauguuacgcuu

SEQ ID NO: 2748 - RNA, 19 nt, Artificial Sequence
  Description of Artificial Sequence:  siNA antisense region
guaucuuaaucucuggcac

SEQ ID NO: 2749 - RNA, 19 nt, Artificial Sequence
  Description of Artificial Sequence:  siNA antisense region
caacacccaaauuauugag

SEQ ID NO: 2750 - RNA, 19 nt, Artificial Sequence
  Description of Artificial Sequence:  siNA antisense region
caguauuagcagcgauauc

SEQ ID NO: 2751 - RNA, 19 nt, Artificial Sequence
  Description of Artificial Sequence:  siNA antisense region
uuuuguagucccagauuac

SEQ ID NO: 2752 - RNA, 19 nt, Artificial Sequence
  Description of Artificial Sequence:  siNA antisense region
caugugcuggggcuucucu

SEQ ID NO: 2753 - RNA, 19 nt, Artificial Sequence
  Description of Artificial Sequence:  siNA antisense region
agacaccuauuguagauac

SEQ ID NO: 2754 - RNA, 19 nt, Artificial Sequence
  Description of Artificial Sequence:  siNA antisense region
caaugucagucauugugca

SEQ ID NO: 2755 - RNA, 19 nt, Artificial Sequence
  Description of Artificial Sequence:  siNA antisense region
ucucaguagguuucuuggc

SEQ ID NO: 2756 - RNA, 19 nt, Artificial Sequence
  Description of Artificial Sequence:  siNA antisense region
uaagugaagaacaagcacu

SEQ ID NO: 2757 - RNA, 19 nt, Artificial Sequence
  Description of Artificial Sequence:  siNA antisense region
uaccaucaaacaagacagu

SEQ ID NO: 2758 - RNA, 19 nt, Artificial Sequence
  Description of Artificial Sequence:  siNA antisense region
cuaccuguccuuccacucu

SEQ ID NO: 2759 - RNA, 19 nt, Artificial Sequence
  Description of Artificial Sequence:  siNA antisense region
gggcguuucuaaaaagguc

SEQ ID NO: 2760 - RNA, 19 nt, Artificial Sequence
  Description of Artificial Sequence:  siNA antisense region
uuauuaaaacaccauuacg

SEQ ID NO: 2761 - RNA, 19 nt, Artificial Sequence
  Description of Artificial Sequence:  siNA antisense region
cuuugacugaaccuucugu

SEQ ID NO: 2762 - RNA, 19 nt, Artificial Sequence
  Description of Artificial Sequence:  siNA antisense region
ccuuugaagguguuagacc

SEQ ID NO: 2763 - RNA, 19 nt, Artificial Sequence
  Description of Artificial Sequence:  siNA antisense region
cgcuagcuugugcuggucc

SEQ ID NO: 2764 - RNA, 19 nt, Artificial Sequence
  Description of Artificial Sequence:  siNA antisense region
uuaaugugacuccauugac

SEQ ID NO: 2765 - RNA, 19 nt, Artificial Sequence
  Description of Artificial Sequence:  siNA antisense region
uuuuuacugauucuccaau

SEQ ID NO: 2766 - RNA, 19 nt, Artificial Sequence
  Description of Artificial Sequence:  siNA antisense region
uaaaguaguuaaacugugu

SEQ ID NO: 2767 - RNA, 19 nt, Artificial Sequence
  Description of Artificial Sequence:  siNA antisense region
uaaugccgucuacuuucuu

SEQ ID NO: 2768 - RNA, 19 nt, Artificial Sequence
  Description of Artificial Sequence:  siNA antisense region
uuucaggcaacuguugaau

SEQ ID NO: 2769 - RNA, 19 nt, Artificial Sequence
  Description of Artificial Sequence:  siNA antisense region
ugcucugaguaaaguaggu

SEQ ID NO: 2770 - RNA, 19 nt, Artificial Sequence
  Description of Artificial Sequence:  siNA antisense region
uaaaauccucuaagucucu

SEQ ID NO: 2771 - RNA, 19 nt, Artificial Sequence
  Description of Artificial Sequence:  siNA antisense region
ccauuugugaucugggcuu

SEQ ID NO: 2772 - RNA, 19 nt, Artificial Sequence
  Description of Artificial Sequence:  siNA antisense region
gcucgagaaagucaguuuc

SEQ ID NO: 2773 - RNA, 19 nt, Artificial Sequence
  Description of Artificial Sequence:  siNA antisense region
ugaauucauccauagcgag

SEQ ID NO: 2774 - RNA, 19 nt, Artificial Sequence
  Description of Artificial Sequence:  siNA antisense region
cgagcuuauaucgcuguau

SEQ ID NO: 2775 - RNA, 19 nt, Artificial Sequence
  Description of Artificial Sequence:  siNA antisense region
guucgaaggcauagcccuc

SEQ ID NO: 2776 - RNA, 19 nt, Artificial Sequence
  Description of Artificial Sequence:  siNA antisense region
aaucuccauaaacgaugug

SEQ ID NO: 2777 - RNA, 19 nt, Artificial Sequence
  Description of Artificial Sequence:  siNA antisense region
caaguuguccaugacugaa

SEQ ID NO: 2778 - RNA, 19 nt, Artificial Sequence
  Description of Artificial Sequence:  siNA antisense region
ucauuaaaugaagaccgcc

SEQ ID NO: 2779 - RNA, 19 nt, Artificial Sequence
  Description of Artificial Sequence:  siNA antisense region
agcgcuuggcuaagccuau

SEQ ID NO: 2780 - RNA, 19 nt, Artificial Sequence
  Description of Artificial Sequence:  siNA antisense region
uaaguggugaaucuuguga

SEQ ID NO: 2781 - RNA, 19 nt, Artificial Sequence
  Description of Artificial Sequence:  siNA antisense region
ggauaaaauccucuaauuu

SEQ ID NO: 2782 - RNA, 19 nt, Artificial Sequence
  Description of Artificial Sequence:  siNA antisense region
ucacugugcuguccauagg

SEQ ID NO: 2783 - RNA, 19 nt, Artificial Sequence
  Description of Artificial Sequence:  siNA antisense region
cuguuaugaaguaauuuuu

SEQ ID NO: 2784 - RNA, 19 nt, Artificial Sequence
  Description of Artificial Sequence:  siNA antisense region
augaaccuguuugcgcauc

SEQ ID NO: 2785 - RNA, 19 nt, Artificial Sequence
  Description of Artificial Sequence:  siNA antisense region
cagaacacacacauuuuga

SEQ ID NO: 2786 - RNA, 19 nt, Artificial Sequence
  Description of Artificial Sequence:  siNA antisense region
caaguaaaagaucaaucac

SEQ ID NO: 2787 - RNA, 19 nt, Artificial Sequence
  Description of Artificial Sequence:  siNA antisense region
uuaucucgacaaagucauc

SEQ ID NO: 2788 - RNA, 19 nt, Artificial Sequence
  Description of Artificial Sequence:  siNA antisense region
acaaaucuugugacuuuau

SEQ ID NO: 2789 - RNA, 19 nt, Artificial Sequence
  Description of Artificial Sequence:  siNA antisense region
ccacuuuugaaaucacuga

SEQ ID NO: 2790 - RNA, 19 nt, Artificial Sequence
  Description of Artificial Sequence:  siNA antisense region
agucaauuguaaccuugac

SEQ ID NO: 2791 - RNA, 19 nt, Artificial Sequence
  Description of Artificial Sequence:  siNA antisense region
ugaaugaaauuucagcaua

SEQ ID NO: 2792 - RNA, 19 nt, Artificial Sequence
  Description of Artificial Sequence:  siNA antisense region
cauccuuacaccaaagcau

SEQ ID NO: 2793 - RNA, 19 nt, Artificial Sequence
  Description of Artificial Sequence:  siNA antisense region
agaagguuucaacaugucc

SEQ ID NO: 2794 - RNA, 19 nt, Artificial Sequence
  Description of Artificial Sequence:  siNA antisense region
uugcuuguaguuuugggua

SEQ ID NO: 2795 - RNA, 19 nt, Artificial Sequence
  Description of Artificial Sequence:  siNA antisense region
cugguugccacgcucgacu

SEQ ID NO: 2796 - RNA, 19 nt, Artificial Sequence
  Description of Artificial Sequence:  siNA antisense region
aguuaggcaucgcaacacc

SEQ ID NO: 2797 - RNA, 19 nt, Artificial Sequence
  Description of Artificial Sequence:  siNA antisense region
uucuuugcaucuuguacaa

SEQ ID NO: 2798 - RNA, 19 nt, Artificial Sequence
  Description of Artificial Sequence:  siNA antisense region
cacacuuuucaagaagcau

SEQ ID NO: 2799 - RNA, 19 nt, Artificial Sequence
  Description of Artificial Sequence:  siNA antisense region
caccauaauucugaagguc

SEQ ID NO: 2800 - RNA, 19 nt, Artificial Sequence
  Description of Artificial Sequence:  siNA antisense region
uugguauaacagcauuuuc

SEQ ID NO: 2801 - RNA, 19 nt, Artificial Sequence
  Description of Artificial Sequence:  siNA antisense region
cauucaucauuauuccuuu

SEQ ID NO: 2802 - RNA, 19 nt, Artificial Sequence
  Description of Artificial Sequence:  siNA antisense region
guugaguauacuuugcgac

SEQ ID NO: 2803 - RNA, 19 nt, Artificial Sequence
  Description of Artificial Sequence:  siNA antisense region
uauuuaaguauugacacag

SEQ ID NO: 2804 - RNA, 19 nt, Artificial Sequence
  Description of Artificial Sequence:  siNA antisense region
guacagcuaaaguaagugu

SEQ ID NO: 2805 - RNA, 19 nt, Artificial Sequence
  Description of Artificial Sequence:  siNA antisense region
uaacucucauguuguaggg

SEQ ID NO: 2806 - RNA, 19 nt, Artificial Sequence
  Description of Artificial Sequence:  siNA antisense region
agccagcaccaaagugaau

SEQ ID NO: 2807 - RNA, 19 nt, Artificial Sequence
  Description of Artificial Sequence:  siNA antisense region
gugcaacuccuuuaucaga

SEQ ID NO: 2808 - RNA, 19 nt, Artificial Sequence
  Description of Artificial Sequence:  siNA antisense region
ugagcacagcuguaccugg

SEQ ID NO: 2809 - RNA, 19 nt, Artificial Sequence
  Description of Artificial Sequence:  siNA antisense region
caguuggcaaccauugucu

SEQ ID NO: 2810 - RNA, 19 nt, Artificial Sequence
  Description of Artificial Sequence:  siNA antisense region
aaucgacaaguagugugcc

SEQ ID NO: 2811 - RNA, 19 nt, Artificial Sequence
  Description of Artificial Sequence:  siNA antisense region
cgaagucauuaagaucuga

SEQ ID NO: 2812 - RNA, 19 nt, Artificial Sequence
  Description of Artificial Sequence:  siNA antisense region
uagaauaugcgucggagac

SEQ ID NO: 2813 - RNA, 19 nt, Artificial Sequence
  Description of Artificial Sequence:  siNA antisense region
cacagucuccaauuaaagu

SEQ ID NO: 2814 - RNA, 19 nt, Artificial Sequence
  Description of Artificial Sequence:  siNA antisense region
uagccguauguacuguugc

SEQ ID NO: 2815 - RNA, 19 nt, Artificial Sequence
  Description of Artificial Sequence:  siNA antisense region
uaauaaggucccauuuauu

SEQ ID NO: 2816 - RNA, 19 nt, Artificial Sequence
  Description of Artificial Sequence:  siNA antisense region
ggucauacauaucgcuaau

SEQ ID NO: 2817 - RNA, 19 nt, Artificial Sequence
  Description of Artificial Sequence:  siNA antisense region
ucacauguuugguccuagg

SEQ ID NO: 2818 - RNA, 19 nt, Artificial Sequence
  Description of Artificial Sequence:  siNA antisense region
uagagucauucucuuuugu

SEQ ID NO: 2819 - RNA, 19 nt, Artificial Sequence
  Description of Artificial Sequence:  siNA antisense region
aagugaaaaacccuucuuu

SEQ ID NO: 2820 - RNA, 19 nt, Artificial Sequence
  Description of Artificial Sequence:  siNA antisense region
uuauaaauccacacagaua

SEQ ID NO: 2821 - RNA, 19 nt, Artificial Sequence
  Description of Artificial Sequence:  siNA antisense region
ccagggcuaguuuuugcuu

SEQ ID NO: 2822 - RNA, 19 nt, Artificial Sequence
  Description of Artificial Sequence:  siNA antisense region
uuacagcuauagaaccacc

SEQ ID NO: 2823 - RNA, 19 nt, Artificial Sequence
  Description of Artificial Sequence:  siNA antisense region
aagaaugcucuguuaucuu

SEQ ID NO: 2824 - RNA, 19 nt, Artificial Sequence
  Description of Artificial Sequence:  siNA antisense region
uguaaaggucagcauucca

SEQ ID NO: 2825 - RNA, 19 nt, Artificial Sequence
  Description of Artificial Sequence:  siNA antisense region
agaaauggcccauaagcuu

SEQ ID NO: 2826 - RNA, 19 nt, Artificial Sequence
  Description of Artificial Sequence:  siNA antisense region
caaaagcuguccaccauga

SEQ ID NO: 2827 - RNA, 19 nt, Artificial Sequence
  Description of Artificial Sequence:  siNA antisense region
augcauuuacauuuguaac

SEQ ID NO: 2828 - RNA, 19 nt, Artificial Sequence
  Description of Artificial Sequence:  siNA antisense region
aaaaugcuuccgaugauga

SEQ ID NO: 2829 - RNA, 19 nt, Artificial Sequence
  Description of Artificial Sequence:  siNA antisense region
gauaguuagccccaauuaa

SEQ ID NO: 2830 - RNA, 19 nt, Artificial Sequence
  Description of Artificial Sequence:  siNA antisense region
guuccuucggcuugccaag

SEQ ID NO: 2831 - RNA, 19 nt, Artificial Sequence
  Description of Artificial Sequence:  siNA antisense region
ugguauagccaucaauuug

SEQ ID NO: 2832 - RNA, 19 nt, Artificial Sequence
  Description of Artificial Sequence:  siNA antisense region
aaauguaguuagcaugcau

SEQ ID NO: 2833 - RNA, 19 nt, Artificial Sequence
  Description of Artificial Sequence:  siNA antisense region
gauuuguguuccuccagaa

SEQ ID NO: 2834 - RNA, 19 nt, Artificial Sequence
  Description of Artificial Sequence:  siNA antisense region
aggaagacaacuggauagg

SEQ ID NO: 2835 - RNA, 19 nt, Artificial Sequence
  Description of Artificial Sequence:  siNA antisense region
ucaugucaaagagugaaua

SEQ ID NO: 2836 - RNA, 19 nt, Artificial Sequence
  Description of Artificial Sequence:  siNA antisense region
auuuaagaggaaauuugcu

SEQ ID NO: 2837 - RNA, 19 nt, Artificial Sequence
  Description of Artificial Sequence:  siNA antisense region
uuacagcaguuccucuuaa

SEQ ID NO: 2838 - RNA, 19 nt, Artificial Sequence
  Description of Artificial Sequence:  siNA antisense region
gauucuccuuaagagacau

SEQ ID NO: 2839 - RNA, 19 nt, Artificial Sequence
  Description of Artificial Sequence:  siNA antisense region
aaaucauaucauugauuug

SEQ ID NO: 2840 - RNA, 19 nt, Artificial Sequence
  Description of Artificial Sequence:  siNA antisense region
cuuuuuccagaagagaaua

SEQ ID NO: 2841 - RNA, 19 nt, Artificial Sequence
  Description of Artificial Sequence:  siNA antisense region
cucuaaugauaagccuacc

SEQ ID NO: 2842 - RNA, 19 nt, Artificial Sequence
  Description of Artificial Sequence:  siNA antisense region
ccacaacucuguuguuuuc

SEQ ID NO: 2843 - RNA, 19 nt, Artificial Sequence
  Description of Artificial Sequence:  siNA antisense region
caagaauaucacuugaaac

SEQ ID NO: 2844 - RNA, 19 nt, Artificial Sequence
  Description of Artificial Sequence:  siNA antisense region
uguucguuuaguuguuaac

SEQ ID NO: 2845 - RNA, 19 nt, Artificial Sequence
  Description of Artificial Sequence:  siNA antisense region
auaauaagaaaauaaacau

SEQ ID NO: 2846 - RNA, 19 nt, Artificial Sequence
  Description of Artificial Sequence:  siNA antisense region
cacuagugagaguaagaaa

SEQ ID NO: 2847 - RNA, 19 nt, Artificial Sequence
  Description of Artificial Sequence:  siNA antisense region
accggucaaggucacuacc

SEQ ID NO: 2848 - RNA, 19 nt, Artificial Sequence
  Description of Artificial Sequence:  siNA antisense region
caucaucaaaaguggugca

SEQ ID NO: 2849 - RNA, 19 nt, Artificial Sequence
  Description of Artificial Sequence:  siNA antisense region
uguaauuaggagcuugaac

SEQ ID NO: 2850 - RNA, 19 nt, Artificial Sequence
  Description of Artificial Sequence:  siNA antisense region
uagaugaaguauguugagu

SEQ ID NO: 2851 - RNA, 19 nt, Artificial Sequence
  Description of Artificial Sequence:  siNA antisense region
gauaguaaaccccccucau

SEQ ID NO: 2852 - RNA, 19 nt, Artificial Sequence
  Description of Artificial Sequence:  siNA antisense region
aucuaaaaauuucaucagg

SEQ ID NO: 2853 - RNA, 19 nt, Artificial Sequence
  Description of Artificial Sequence:  siNA antisense region
uuaaauaaagagugucuga

SEQ ID NO: 2854 - RNA, 19 nt, Artificial Sequence
  Description of Artificial Sequence:  siNA antisense region
gaagaaauaaauccugagu

SEQ ID NO: 2855 - RNA, 19 nt, Artificial Sequence
  Description of Artificial Sequence:  siNA antisense region
uaacauuagaauaaaaugg

SEQ ID NO: 2856 - RNA, 19 nt, Artificial Sequence
  Description of Artificial Sequence:  siNA antisense region
uaauaguaugaaacccugu

SEQ ID NO: 2857 - RNA, 19 nt, Artificial Sequence
  Description of Artificial Sequence:  siNA antisense region
gguugccaaacguaugauu

SEQ ID NO: 2858 - RNA, 19 nt, Artificial Sequence
  Description of Artificial Sequence:  siNA antisense region
ccuuaaaagguaugacagg

SEQ ID NO: 2859 - RNA, 19 nt, Artificial Sequence
  Description of Artificial Sequence:  siNA antisense region
cagcaaaauaaauaccauc

SEQ ID NO: 2860 - RNA, 19 nt, Artificial Sequence
  Description of Artificial Sequence:  siNA antisense region
cauuugauuucucuguggc

SEQ ID NO: 2861 - RNA, 19 nt, Artificial Sequence
  Description of Artificial Sequence:  siNA antisense region
aaacccaaccacggacaac

SEQ ID NO: 2862 - RNA, 19 nt, Artificial Sequence
  Description of Artificial Sequence:  siNA antisense region
uguucaugguagaaccaaa

SEQ ID NO: 2863 - RNA, 19 nt, Artificial Sequence
  Description of Artificial Sequence:  siNA antisense region
ucaccgacugugacuuguu

SEQ ID NO: 2864 - RNA, 19 nt, Artificial Sequence
  Description of Artificial Sequence:  siNA antisense region
uagaauuguuaauaauaau

SEQ ID NO: 2865 - RNA, 19 nt, Artificial Sequence
  Description of Artificial Sequence:  siNA antisense region
cucguauaacaacauuagu

SEQ ID NO: 2866 - RNA, 19 nt, Artificial Sequence
  Description of Artificial Sequence:  siNA antisense region
acaauucaaaguuacaugc

SEQ ID NO: 2867 - RNA, 19 nt, Artificial Sequence
  Description of Artificial Sequence:  siNA antisense region
caaagaaaggguugucaca

SEQ ID NO: 2868 - RNA, 19 nt, Artificial Sequence
  Description of Artificial Sequence:  siNA antisense region
ccauggguuuagaaacagc

SEQ ID NO: 2869 - RNA, 19 nt, Artificial Sequence
  Description of Artificial Sequence:  siNA antisense region
uaguaugugucuguguacc

SEQ ID NO: 2870 - RNA, 19 nt, Artificial Sequence
  Description of Artificial Sequence:  siNA antisense region
augcauuaucgaauaucau

SEQ ID NO: 2871 - RNA, 19 nt, Artificial Sequence
  Description of Artificial Sequence:  siNA antisense region
acucgaaagugcaauuaaa

SEQ ID NO: 2872 - RNA, 19 nt, Artificial Sequence
  Description of Artificial Sequence:  siNA antisense region
aaaaggcaucagauaugua

SEQ ID NO: 2873 - RNA, 19 nt, Artificial Sequence
  Description of Artificial Sequence:  siNA antisense region
uuucugaaacaucaagcga

SEQ ID NO: 2874 - RNA, 19 nt, Artificial Sequence
  Description of Artificial Sequence:  siNA antisense region
guuuaaaauuaccugacuu

SEQ ID NO: 2875 - RNA, 19 nt, Artificial Sequence
  Description of Artificial Sequence:  siNA antisense region
acacaaacucucguaagug

SEQ ID NO: 2876 - RNA, 19 nt, Artificial Sequence
  Description of Artificial Sequence:  siNA antisense region
acccaucuuuauuuuuaaa

SEQ ID NO: 2877 - RNA, 19 nt, Artificial Sequence
  Description of Artificial Sequence:  siNA antisense region
ccuuauaaacauagagaaa

SEQ ID NO: 2878 - RNA, 19 nt, Artificial Sequence
  Description of Artificial Sequence:  siNA antisense region
caucuauagguugauagcc

SEQ ID NO: 2879 - RNA, 19 nt, Artificial Sequence
  Description of Artificial Sequence:  siNA antisense region
aagguagaucacgaacuac

SEQ ID NO: 2880 - RNA, 19 nt, Artificial Sequence
  Description of Artificial Sequence:  siNA antisense region
ucaaaguguuaaaaccaga

SEQ ID NO: 2881 - RNA, 19 nt, Artificial Sequence
  Description of Artificial Sequence:  siNA antisense region
gcaacuuaaaaauagguuu

SEQ ID NO: 2882 - RNA, 19 nt, Artificial Sequence
  Description of Artificial Sequence:  siNA antisense region
uaauguuaauaccaagagg

SEQ ID NO: 2883 - RNA, 19 nt, Artificial Sequence
  Description of Artificial Sequence:  siNA antisense region
gaauggcucuaaaauuugu

SEQ ID NO: 2884 - RNA, 19 nt, Artificial Sequence
  Description of Artificial Sequence:  siNA antisense region
caggugaaaaggcuguaag

SEQ ID NO: 2885 - RNA, 19 nt, Artificial Sequence
  Description of Artificial Sequence:  siNA antisense region
ugccccaaaugucuugagc

SEQ ID NO: 2886 - RNA, 19 nt, Artificial Sequence
  Description of Artificial Sequence:  siNA antisense region
aauaggcugcagcugacgu

SEQ ID NO: 2887 - RNA, 19 nt, Artificial Sequence
  Description of Artificial Sequence:  siNA antisense region
gcuuuaaauagccaacaaa

SEQ ID NO: 2888 - RNA, 19 nt, Artificial Sequence
  Description of Artificial Sequence:  siNA antisense region
ugagcauaaauguaguugg

SEQ ID NO: 2889 - RNA, 19 nt, Artificial Sequence
  Description of Artificial Sequence:  siNA antisense region
uaccauuuucaucauacuu

SEQ ID NO: 2890 - RNA, 19 nt, Artificial Sequence
  Description of Artificial Sequence:  siNA antisense region
caacagcaucugugauugu

SEQ ID NO: 2891 - RNA, 19 nt, Artificial Sequence
  Description of Artificial Sequence:  siNA antisense region
guggauuuugagaacaauc

SEQ ID NO: 2892 - RNA, 19 nt, Artificial Sequence
  Description of Artificial Sequence:  siNA antisense region
agcauuugaguucagcaag

SEQ ID NO: 2893 - RNA, 19 nt, Artificial Sequence
  Description of Artificial Sequence:  siNA antisense region
ucucaaagcucuuaacaga

SEQ ID NO: 2894 - RNA, 19 nt, Artificial Sequence
  Description of Artificial Sequence:  siNA antisense region
gguaaauuccuuugucaau

SEQ ID NO: 2895 - RNA, 19 nt, Artificial Sequence
  Description of Artificial Sequence:  siNA antisense region
cccugaaauuagaggucug

SEQ ID NO: 2896 - RNA, 19 nt, Artificial Sequence
  Description of Artificial Sequence:  siNA antisense region
caucuccugagggaacaac

SEQ ID NO: 2897 - RNA, 19 nt, Artificial Sequence
  Description of Artificial Sequence:  siNA antisense region
uauuagggaaucucacaac

SEQ ID NO: 2898 - RNA, 19 nt, Artificial Sequence
  Description of Artificial Sequence:  siNA antisense region
aaggacacaaguuuguaau

SEQ ID NO: 2899 - RNA, 19 nt, Artificial Sequence
  Description of Artificial Sequence:  siNA antisense region
cauuaaaaaccucuccaaa

SEQ ID NO: 2900 - RNA, 19 nt, Artificial Sequence
  Description of Artificial Sequence:  siNA antisense region
cagaagggaauuuaguagc

SEQ ID NO: 2901 - RNA, 19 nt, Artificial Sequence
  Description of Artificial Sequence:  siNA antisense region
uucucucccaugcauagac

SEQ ID NO: 2902 - RNA, 19 nt, Artificial Sequence
  Description of Artificial Sequence:  siNA antisense region
cacaauuagaaauuuuuuu

SEQ ID NO: 2903 - RNA, 19 nt, Artificial Sequence
  Description of Artificial Sequence:  siNA antisense region
gcacagaguaaucagcaac

SEQ ID NO: 2904 - RNA, 19 nt, Artificial Sequence
  Description of Artificial Sequence:  siNA antisense region
aaaauguugaguuguagag

SEQ ID NO: 2905 - RNA, 19 nt, Artificial Sequence
  Description of Artificial Sequence:  siNA antisense region
agcacuuaaagguugaaaa

SEQ ID NO: 2906 - RNA, 19 nt, Artificial Sequence
  Description of Artificial Sequence:  siNA antisense region
uaguggcagaaacgccaua

SEQ ID NO: 2907 - RNA, 19 nt, Artificial Sequence
  Description of Artificial Sequence:  siNA antisense region
agcaaagaucauucaacuu

SEQ ID NO: 2908 - RNA, 19 nt, Artificial Sequence
  Description of Artificial Sequence:  siNA antisense region
cugcauagacauuggagaa

SEQ ID NO: 2909 - RNA, 19 nt, Artificial Sequence
  Description of Artificial Sequence:  siNA antisense region
ccuugacuacaaaagaauc

SEQ ID NO: 2910 - RNA, 19 nt, Artificial Sequence
  Description of Artificial Sequence:  siNA antisense region
uuugucuuacaucaucucc

SEQ ID NO: 2911 - RNA, 19 nt, Artificial Sequence
  Description of Artificial Sequence:  siNA antisense region
caguuuguccuggcgcuau

SEQ ID NO: 2912 - RNA, 19 nt, Artificial Sequence
  Description of Artificial Sequence:  siNA antisense region
uauaaucagcaauaacacc

SEQ ID NO: 2913 - RNA, 19 nt, Artificial Sequence
  Description of Artificial Sequence:  siNA antisense region
caucuggcaauuuauaauu

SEQ ID NO: 2914 - RNA, 19 nt, Artificial Sequence
  Description of Artificial Sequence:  siNA antisense region
ggacacaacccaugaaauc

SEQ ID NO: 2915 - RNA, 19 nt, Artificial Sequence
  Description of Artificial Sequence:  siNA antisense region
uccuaguauuccaagcaag

SEQ ID NO: 2916 - RNA, 19 nt, Artificial Sequence
  Description of Artificial Sequence:  siNA antisense region
uugaaguagcaucaauguu

SEQ ID NO: 2917 - RNA, 19 nt, Artificial Sequence
  Description of Artificial Sequence:  siNA antisense region
uauaauuauaauuaccagu

SEQ ID NO: 2918 - RNA, 19 nt, Artificial Sequence
  Description of Artificial Sequence:  siNA antisense region
gucuaagauaccuauauuu

SEQ ID NO: 2919 - RNA, 19 nt, Artificial Sequence
  Description of Artificial Sequence:  siNA antisense region
agggccuaagcuugccaug

SEQ ID NO: 2920 - RNA, 19 nt, Artificial Sequence
  Description of Artificial Sequence:  siNA antisense region
uagauaugucucucucaaa

SEQ ID NO: 2921 - RNA, 19 nt, Artificial Sequence
  Description of Artificial Sequence:  siNA antisense region
caggggagaaaggcacauu

SEQ ID NO: 2922 - RNA, 19 nt, Artificial Sequence
  Description of Artificial Sequence:  siNA antisense region
gggugcaagguuugccauc

SEQ ID NO: 2923 - RNA, 19 nt, Artificial Sequence
  Description of Artificial Sequence:  siNA antisense region
aacaauuaagagcaggugg

SEQ ID NO: 2924 - RNA, 19 nt, Artificial Sequence
  Description of Artificial Sequence:  siNA antisense region
aaucauuuaauggccaaua

SEQ ID NO: 2925 - RNA, 19 nt, Artificial Sequence
  Description of Artificial Sequence:  siNA antisense region
uagugguguaaaaaccaua

SEQ ID NO: 2926 - RNA, 19 nt, Artificial Sequence
  Description of Artificial Sequence:  siNA antisense region
guugguagccaaugccagu

SEQ ID NO: 2927 - RNA, 19 nt, Artificial Sequence
  Description of Artificial Sequence:  siNA antisense region
guacuacaacucuguaagg

SEQ ID NO: 2928 - RNA, 19 nt, Artificial Sequence
  Description of Artificial Sequence:  siNA antisense region
uuaaaaguucaaaagaaag

SEQ ID NO: 2929 - RNA, 19 nt, Artificial Sequence
  Description of Artificial Sequence:  siNA antisense region
aaaccguggccggugcauu

SEQ ID NO: 2930 - RNA, 19 nt, Artificial Sequence
  Description of Artificial Sequence:  siNA antisense region
uggauaauuuugguccaca

SEQ ID NO: 2931 - RNA, 19 nt, Artificial Sequence
  Description of Artificial Sequence:  siNA antisense region
gguucuuaauaaggucagu

SEQ ID NO: 2932 - RNA, 19 nt, Artificial Sequence
  Description of Artificial Sequence:  siNA antisense region
aauuaaaauugacacacug

SEQ ID NO: 2933 - RNA, 19 nt, Artificial Sequence
  Description of Artificial Sequence:  siNA antisense region
uaccagugaguccauuaaa

SEQ ID NO: 2934 - RNA, 19 nt, Artificial Sequence
  Description of Artificial Sequence:  siNA antisense region
aaggaguuaacacaccagu

SEQ ID NO: 2935 - RNA, 19 nt, Artificial Sequence
  Description of Artificial Sequence:  siNA antisense region
guugaaaucucuuugaaga

SEQ ID NO: 2936 - RNA, 19 nt, Artificial Sequence
  Description of Artificial Sequence:  siNA antisense region
ggccaaauuguugaaaugg

SEQ ID NO: 2937 - RNA, 19 nt, Artificial Sequence
  Description of Artificial Sequence:  siNA antisense region
ugaaaucagaaacaucacg

SEQ ID NO: 2938 - RNA, 19 nt, Artificial Sequence
  Description of Artificial Sequence:  siNA antisense region
gaucucgaacggaaucagu

SEQ ID NO: 2939 - RNA, 19 nt, Artificial Sequence
  Description of Artificial Sequence:  siNA antisense region
auauuucagauguuuuagg

SEQ ID NO: 2940 - RNA, 19 nt, Artificial Sequence
  Description of Artificial Sequence:  siNA antisense region
cgcaaggugaaaugucuaa

SEQ ID NO: 2941 - RNA, 19 nt, Artificial Sequence
  Description of Artificial Sequence:  siNA antisense region
cacuuacacccccaaaagc

SEQ ID NO: 2942 - RNA, 19 nt, Artificial Sequence
  Description of Artificial Sequence:  siNA antisense region
uuguuccagguguaauuac

SEQ ID NO: 2943 - RNA, 19 nt, Artificial Sequence
  Description of Artificial Sequence:  siNA antisense region
caacuucagaugaagcauu

SEQ ID NO: 2944 - RNA, 19 nt, Artificial Sequence
  Description of Artificial Sequence:  siNA antisense region
caucuugauauagaacagc

SEQ ID NO: 2945 - RNA, 19 nt, Artificial Sequence
  Description of Artificial Sequence:  siNA antisense region
aaacaucagugcaguuaac

SEQ ID NO: 2946 - RNA, 19 nt, Artificial Sequence
  Description of Artificial Sequence:  siNA antisense region
cugcaugaauugcuguaga

SEQ ID NO: 2947 - RNA, 19 nt, Artificial Sequence
  Description of Artificial Sequence:  siNA antisense region
aagcuggugugaguugauc

SEQ ID NO: 2948 - RNA, 19 nt, Artificial Sequence
  Description of Artificial Sequence:  siNA antisense region
caguagaauauaugcgcca

SEQ ID NO: 2949 - RNA, 19 nt, Artificial Sequence
  Description of Artificial Sequence:  siNA antisense region
ucuggaauacauuguuucc

SEQ ID NO: 2950 - RNA, 19 nt, Artificial Sequence
  Description of Artificial Sequence:  siNA antisense region
uaagacagccugcuugagu

SEQ ID NO: 2951 - RNA, 19 nt, Artificial Sequence
  Description of Artificial Sequence:  siNA antisense region
cgacaugcucagcuccuau

SEQ ID NO: 2952 - RNA, 19 nt, Artificial Sequence
  Description of Artificial Sequence:  siNA antisense region
cgcacucauaagaaguguc

SEQ ID NO: 2953 - RNA, 19 nt, Artificial Sequence
  Description of Artificial Sequence:  siNA antisense region
cagcuccaauaggaauguc

SEQ ID NO: 2954 - RNA, 19 nt, Artificial Sequence
  Description of Artificial Sequence:  siNA antisense region
gguaacuagcacaaaugcc

SEQ ID NO: 2955 - RNA, 19 nt, Artificial Sequence
  Description of Artificial Sequence:  siNA antisense region
guaauaaagaaacuguaug

SEQ ID NO: 2956 - RNA, 19 nt, Artificial Sequence
  Description of Artificial Sequence:  siNA antisense region
auuuuuggcuaguacuacg

SEQ ID NO: 2957 - RNA, 19 nt, Artificial Sequence
  Description of Artificial Sequence:  siNA antisense region
uaguauaagccacaauaga

SEQ ID NO: 2958 - RNA, 19 nt, Artificial Sequence
  Description of Artificial Sequence:  siNA antisense region
uaucagcaccuaaagacau

SEQ ID NO: 2959 - RNA, 19 nt, Artificial Sequence
  Description of Artificial Sequence:  siNA antisense region
uagaguaagcaauugaacu

SEQ ID NO: 2960 - RNA, 19 nt, Artificial Sequence
  Description of Artificial Sequence:  siNA antisense region
guauagcaaugguguuauu

SEQ ID NO: 2961 - RNA, 19 nt, Artificial Sequence
  Description of Artificial Sequence:  siNA antisense region
uaauugaaaaguuaguagg

SEQ ID NO: 2962 - RNA, 19 nt, Artificial Sequence
  Description of Artificial Sequence:  siNA antisense region
uuacuucuguaguaaugcu

SEQ ID NO: 2963 - RNA, 19 nt, Artificial Sequence
  Description of Artificial Sequence:  siNA antisense region
uagccauagaaacaggcau

SEQ ID NO: 2964 - RNA, 19 nt, Artificial Sequence
  Description of Artificial Sequence:  siNA antisense region
uacaaucuacggagguuuu

SEQ ID NO: 2965 - RNA, 19 nt, Artificial Sequence
  Description of Artificial Sequence:  siNA antisense region
cuccgcagauguacauauu

SEQ ID NO: 2966 - RNA, 19 nt, Artificial Sequence
  Description of Artificial Sequence:  siNA antisense region
uagcacauucaguagaauc

SEQ ID NO: 2967 - RNA, 19 nt, Artificial Sequence
  Description of Artificial Sequence:  siNA antisense region
cauauuggagaagcaaauu

SEQ ID NO: 2968 - RNA, 19 nt, Artificial Sequence
  Description of Artificial Sequence:  siNA antisense region
guugugugcaaaagcuacc

SEQ ID NO: 2969 - RNA, 19 nt, Artificial Sequence
  Description of Artificial Sequence:  siNA antisense region
cugagagugcacgauuuag

SEQ ID NO: 2970 - RNA, 19 nt, Artificial Sequence
  Description of Artificial Sequence:  siNA antisense region
ccuguucagcagcaauacc

SEQ ID NO: 2971 - RNA, 19 nt, Artificial Sequence
  Description of Artificial Sequence:  siNA antisense region
cuucacguguguugcgauc

SEQ ID NO: 2972 - RNA, 19 nt, Artificial Sequence
  Description of Artificial Sequence:  siNA antisense region
guuugacuugagcgaacac

SEQ ID NO: 2973 - RNA, 19 nt, Artificial Sequence
  Description of Artificial Sequence:  siNA antisense region
uugggguuuuguacauuug

SEQ ID NO: 2974 - RNA, 19 nt, Artificial Sequence
  Description of Artificial Sequence:  siNA antisense region
caccaaaauauuucaaagu

SEQ ID NO: 2975 - RNA, 19 nt, Artificial Sequence
  Description of Artificial Sequence:  siNA antisense region
uuugugaaaaauuaaaacc

SEQ ID NO: 2976 - RNA, 19 nt, Artificial Sequence
  Description of Artificial Sequence:  siNA antisense region
uuagagggucagguaauau

SEQ ID NO: 2977 - RNA, 19 nt, Artificial Sequence
  Description of Artificial Sequence:  siNA antisense region
aagaccucuuaguuggcuu

SEQ ID NO: 2978 - RNA, 19 nt, Artificial Sequence
  Description of Artificial Sequence:  siNA antisense region
agagcaaguccucaauaaa

SEQ ID NO: 2979 - RNA, 19 nt, Artificial Sequence
  Description of Artificial Sequence:  siNA antisense region
cgagugucaccuuauuaaa

SEQ ID NO: 2980 - RNA, 19 nt, Artificial Sequence
  Description of Artificial Sequence:  siNA antisense region
ucaugaagccagcaucagc

SEQ ID NO: 2981 - RNA, 19 nt, Artificial Sequence
  Description of Artificial Sequence:  siNA antisense region
ggcauucgccauauugcuu

SEQ ID NO: 2982 - RNA, 19 nt, Artificial Sequence
  Description of Artificial Sequence:  siNA antisense region
uagcauuaauaucaccuag

SEQ ID NO: 2983 - RNA, 19 nt, Artificial Sequence
  Description of Artificial Sequence:  siNA antisense region
gcgcacaaaugagaucucu

SEQ ID NO: 2984 - RNA, 19 nt, Artificial Sequence
  Description of Artificial Sequence:  siNA antisense region
uaaguccauugaacuucug

SEQ ID NO: 2985 - RNA, 19 nt, Artificial Sequence
  Description of Artificial Sequence:  siNA antisense region
gcagagguggcaacacugu

SEQ ID NO: 2986 - RNA, 19 nt, Artificial Sequence
  Description of Artificial Sequence:  siNA antisense region
caaucauaucaucagugag

SEQ ID NO: 2987 - RNA, 19 nt, Artificial Sequence
  Description of Artificial Sequence:  siNA antisense region
gagcagcaguguaggcagc

SEQ ID NO: 2988 - RNA, 19 nt, Artificial Sequence
  Description of Artificial Sequence:  siNA antisense region
uggcaguaccacuaacuag

SEQ ID NO: 2989 - RNA, 19 nt, Artificial Sequence
  Description of Artificial Sequence:  siNA antisense region
caaauguccauccagcagu

SEQ ID NO: 2990 - RNA, 19 nt, Artificial Sequence
  Description of Artificial Sequence:  siNA antisense region
gaagagcagcgccagcacc

SEQ ID NO: 2991 - RNA, 19 nt, Artificial Sequence
  Description of Artificial Sequence:  siNA antisense region
gcauagcaaaagguauuug

SEQ ID NO: 2992 - RNA, 19 nt, Artificial Sequence
  Description of Artificial Sequence:  siNA antisense region
ugaaccuauaugccauuug

SEQ ID NO: 2993 - RNA, 19 nt, Artificial Sequence
  Description of Artificial Sequence:  siNA antisense region
ggguaacuccaaugccauu

SEQ ID NO: 2994 - RNA, 19 nt, Artificial Sequence
  Description of Artificial Sequence:  siNA antisense region
ucucauagagaacauuuug

SEQ ID NO: 2995 - RNA, 19 nt, Artificial Sequence
  Description of Artificial Sequence:  siNA antisense region
uggcgauuuguuuuugguu

SEQ ID NO: 2996 - RNA, 19 nt, Artificial Sequence
  Description of Artificial Sequence:  siNA antisense region
ucgccuuguuaaauugguu

SEQ ID NO: 2997 - RNA, 19 nt, Artificial Sequence
  Description of Artificial Sequence:  siNA antisense region
auucuugaauuugacuaau

SEQ ID NO: 2998 - RNA, 19 nt, Artificial Sequence
  Description of Artificial Sequence:  siNA antisense region
uugauguuguuguaaguga

SEQ ID NO: 2999 - RNA, 19 nt, Artificial Sequence
  Description of Artificial Sequence:  siNA antisense region
gcagcuugcccaaugcagu

SEQ ID NO: 3000 - RNA, 19 nt, Artificial Sequence
  Description of Artificial Sequence:  siNA antisense region
ucugguuaacaacgucuug

SEQ ID NO: 3001 - RNA, 19 nt, Artificial Sequence
  Description of Artificial Sequence:  siNA antisense region
uguuuaaugcuugagcauu

SEQ ID NO: 3002 - RNA, 19 nt, Artificial Sequence
  Description of Artificial Sequence:  siNA antisense region
uaaguuguuuaacaagugu

SEQ ID NO: 3003 - RNA, 19 nt, Artificial Sequence
  Description of Artificial Sequence:  siNA antisense region
uugcaccaaaauuagagcu

SEQ ID NO: 3004 - RNA, 19 nt, Artificial Sequence
  Description of Artificial Sequence:  siNA antisense region
cauuuagcacacuugaaau

SEQ ID NO: 3005 - RNA, 19 nt, Artificial Sequence
  Description of Artificial Sequence:  siNA antisense region
caagucgcgaaaggauauc

SEQ ID NO: 3006 - RNA, 19 nt, Artificial Sequence
  Description of Artificial Sequence:  siNA antisense region
ccuccgccucgacuuuauc

SEQ ID NO: 3007 - RNA, 19 nt, Artificial Sequence
  Description of Artificial Sequence:  siNA antisense region
uuaaccugucaauuuguac

SEQ ID NO: 3008 - RNA, 19 nt, Artificial Sequence
  Description of Artificial Sequence:  siNA antisense region
uuugaagucugccuguaau

SEQ ID NO: 3009 - RNA, 19 nt, Artificial Sequence
  Description of Artificial Sequence:  siNA antisense region
uuacauagguuugaaggcu

SEQ ID NO: 3010 - RNA, 19 nt, Artificial Sequence
  Description of Artificial Sequence:  siNA antisense region
cccugauuaguuguugugu

SEQ ID NO: 3011 - RNA, 19 nt, Artificial Sequence
  Description of Artificial Sequence:  siNA antisense region
aagcccugauuucagcagc

SEQ ID NO: 3012 - RNA, 19 nt, Artificial Sequence
  Description of Artificial Sequence:  siNA antisense region
uagcagcaagauuagcaga

SEQ ID NO: 3013 - RNA, 19 nt, Artificial Sequence
  Description of Artificial Sequence:  siNA antisense region
cacacucagacauuuuagu

SEQ ID NO: 3014 - RNA, 19 nt, Artificial Sequence
  Description of Artificial Sequence:  siNA antisense region
uuuuugauuguccaagaac

SEQ ID NO: 3015 - RNA, 19 nt, Artificial Sequence
  Description of Artificial Sequence:  siNA antisense region
uuccacaaaagucaacucu

SEQ ID NO: 3016 - RNA, 19 nt, Artificial Sequence
  Description of Artificial Sequence:  siNA antisense region
acauaaggugguagcccuu

SEQ ID NO: 3017 - RNA, 19 nt, Artificial Sequence
  Description of Artificial Sequence:  siNA antisense region
gggcugcuugugggaagga

SEQ ID NO: 3018 - RNA, 19 nt, Artificial Sequence
  Description of Artificial Sequence:  siNA antisense region
ggaagacaacaccaugcgg

SEQ ID NO: 3019 - RNA, 19 nt, Artificial Sequence
  Description of Artificial Sequence:  siNA antisense region
gcacauacgugacauguag

SEQ ID NO: 3020 - RNA, 19 nt, Artificial Sequence
  Description of Artificial Sequence:  siNA antisense region
aguuccucuccugggaugg

SEQ ID NO: 3021 - RNA, 19 nt, Artificial Sequence
  Description of Artificial Sequence:  siNA antisense region
uugcuggcgcuguggugaa

SEQ ID NO: 3022 - RNA, 19 nt, Artificial Sequence
  Description of Artificial Sequence:  siNA antisense region
cuuugccuucaugacaaau

SEQ ID NO: 3023 - RNA, 19 nt, Artificial Sequence
  Description of Artificial Sequence:  siNA antisense region
cuucacgagggaaguaugc

SEQ ID NO: 3024 - RNA, 19 nt, Artificial Sequence
  Description of Artificial Sequence:  siNA antisense region
cauuaaacacaaaaacacc

SEQ ID NO: 3025 - RNA, 19 nt, Artificial Sequence
  Description of Artificial Sequence:  siNA antisense region
uaauaaaccaagaagugcc

SEQ ID NO: 3026 - RNA, 19 nt, Artificial Sequence
  Description of Artificial Sequence:  siNA antisense region
aaaagaaguuccucugugu

SEQ ID NO: 3027 - RNA, 19 nt, Artificial Sequence
  Description of Artificial Sequence:  siNA antisense region
uaguaauuauuuguggaga

SEQ ID NO: 3028 - RNA, 19 nt, Artificial Sequence
  Description of Artificial Sequence:  siNA antisense region
agacaaauguauugucugu

SEQ ID NO: 3029 - RNA, 19 nt, Artificial Sequence
  Description of Artificial Sequence:  siNA antisense region
cgacaucacaauuuccuga

SEQ ID NO: 3030 - RNA, 19 nt, Artificial Sequence
  Description of Artificial Sequence:  siNA antisense region
uguuaaugaugccaauaac

SEQ ID NO: 3031 - RNA, 19 nt, Artificial Sequence
  Description of Artificial Sequence:  siNA antisense region
gaggaucauaaacuguguu

SEQ ID NO: 3032 - RNA, 19 nt, Artificial Sequence
  Description of Artificial Sequence:  siNA antisense region
agucaagcucagguugcag

SEQ ID NO: 3033 - RNA, 19 nt, Artificial Sequence
  Description of Artificial Sequence:  siNA antisense region
ccagcucuucuuugaauga

SEQ ID NO: 3034 - RNA, 19 nt, Artificial Sequence
  Description of Artificial Sequence:  siNA antisense region
gauuuuugaaguacuuguc

SEQ ID NO: 3035 - RNA, 19 nt, Artificial Sequence
  Description of Artificial Sequence:  siNA antisense region
caacaucuggugauguaug

SEQ ID NO: 3036 - RNA, 19 nt, Artificial Sequence
  Description of Artificial Sequence:  siNA antisense region
cugaaaugucgccaagauc

SEQ ID NO: 3037 - RNA, 19 nt, Artificial Sequence
  Description of Artificial Sequence:  siNA antisense region
cgacagaagcguuaaugcc

SEQ ID NO: 3038 - RNA, 19 nt, Artificial Sequence
  Description of Artificial Sequence:  siNA antisense region
uuucuuuuugaauguugac

SEQ ID NO: 3039 - RNA, 19 nt, Artificial Sequence
  Description of Artificial Sequence:  siNA antisense region
ccucauugaggcggucaau

SEQ ID NO: 3040 - RNA, 19 nt, Artificial Sequence
  Description of Artificial Sequence:  siNA antisense region
cauuuaaauuuuuagcgac

SEQ ID NO: 3041 - RNA, 19 nt, Artificial Sequence
  Description of Artificial Sequence:  siNA antisense region
gaaggucaaugagugauuc

SEQ ID NO: 3042 - RNA, 19 nt, Artificial Sequence
  Description of Artificial Sequence:  siNA antisense region
cauauuuucccaauucuug

SEQ ID NO: 3043 - RNA, 19 nt, Artificial Sequence
  Description of Artificial Sequence:  siNA antisense region
gccauuuaauauauugcuc

SEQ ID NO: 3044 - RNA, 19 nt, Artificial Sequence
  Description of Artificial Sequence:  siNA antisense region
cgagccaaacauaccaagg

SEQ ID NO: 3045 - RNA, 19 nt, Artificial Sequence
  Description of Artificial Sequence:  siNA antisense region
uuaguccagcaaugaagcc

SEQ ID NO: 3046 - RNA, 19 nt, Artificial Sequence
  Description of Artificial Sequence:  siNA antisense region
uaaccaugacgauggcaau

SEQ ID NO: 3047 - RNA, 19 nt, Artificial Sequence
  Description of Artificial Sequence:  siNA antisense region
ugcaacaaagcaagauugu

SEQ ID NO: 3048 - RNA, 19 nt, Artificial Sequence
  Description of Artificial Sequence:  siNA antisense region
aacugcaacaacuagucau

SEQ ID NO: 3049 - RNA, 19 nt, Artificial Sequence
  Description of Artificial Sequence:  siNA antisense region
agcaugcacccuugaggca

SEQ ID NO: 3050 - RNA, 19 nt, Artificial Sequence
  Description of Artificial Sequence:  siNA antisense region
ugcagcaagaaccacaaga

SEQ ID NO: 3051 - RNA, 19 nt, Artificial Sequence
  Description of Artificial Sequence:  siNA antisense region
agucauccucaucaaacuu

SEQ ID NO: 3052 - RNA, 19 nt, Artificial Sequence
  Description of Artificial Sequence:  siNA antisense region
ccuugagaacuggcucaga

SEQ ID NO: 3053 - RNA, 19 nt, Artificial Sequence
  Description of Artificial Sequence:  siNA antisense region
uguaauguaauuugacacc

SEQ ID NO: 3054 - RNA, 19 nt, Artificial Sequence
  Description of Artificial Sequence:  siNA antisense region
uccauaaguucguuuaugu

SEQ ID NO: 3055 - RNA, 19 nt, Artificial Sequence
  Description of Artificial Sequence:  siNA antisense region
aaaaaucucauaaacaaau

SEQ ID NO: 3056 - RNA, 19 nt, Artificial Sequence
  Description of Artificial Sequence:  siNA antisense region
guaauugauccaagaguaa

SEQ ID NO: 3057 - RNA, 19 nt, Artificial Sequence
  Description of Artificial Sequence:  siNA antisense region
auuuuuacuggcugugcag

SEQ ID NO: 3058 - RNA, 19 nt, Artificial Sequence
  Description of Artificial Sequence:  siNA antisense region
gcaggagaagcauugucaa

SEQ ID NO: 3059 - RNA, 19 nt, Artificial Sequence
  Description of Artificial Sequence:  siNA antisense region
guagcaugaacaguacuug

SEQ ID NO: 3060 - RNA, 19 nt, Artificial Sequence
  Description of Artificial Sequence:  siNA antisense region
uguagcgguaucguugcug

SEQ ID NO: 3061 - RNA, 19 nt, Artificial Sequence
  Description of Artificial Sequence:  siNA antisense region
ccgaaagggagugaggcuu

SEQ ID NO: 3062 - RNA, 19 nt, Artificial Sequence
  Description of Artificial Sequence:  siNA antisense region
acgccaauaacaagccauc

SEQ ID NO: 3063 - RNA, 19 nt, Artificial Sequence
  Description of Artificial Sequence:  siNA antisense region
aaaacagcaagaaaugcaa

SEQ ID NO: 3064 - RNA, 19 nt, Artificial Sequence
  Description of Artificial Sequence:  siNA antisense region
auuuugguagcgcucugaa

SEQ ID NO: 3065 - RNA, 19 nt, Artificial Sequence
  Description of Artificial Sequence:  siNA antisense region
cuuuuauugagcgcaauua

SEQ ID NO: 3066 - RNA, 19 nt, Artificial Sequence
  Description of Artificial Sequence:  siNA antisense region
uaaagggcuagcugccauc

SEQ ID NO: 3067 - RNA, 19 nt, Artificial Sequence
  Description of Artificial Sequence:  siNA antisense region
augaacuggaagcccuuau

SEQ ID NO: 3068 - RNA, 19 nt, Artificial Sequence
  Description of Artificial Sequence:  siNA antisense region
agcagcaguaaauugcaaa

SEQ ID NO: 3069 - RNA, 19 nt, Artificial Sequence
  Description of Artificial Sequence:  siNA antisense region
gaauagaugguaacaaaua

SEQ ID NO: 3070 - RNA, 19 nt, Artificial Sequence
  Description of Artificial Sequence:  siNA antisense region
gcgacaagcaaaagaugug

SEQ ID NO: 3071 - RNA, 19 nt, Artificial Sequence
  Description of Artificial Sequence:  siNA antisense region
ugcgccuccauaccugcag

SEQ ID NO: 3072 - RNA, 19 nt, Artificial Sequence
  Description of Artificial Sequence:  siNA antisense region
gcauagagguacaaaaauu

SEQ ID NO: 3073 - RNA, 19 nt, Artificial Sequence
  Description of Artificial Sequence:  siNA antisense region
uguagaaaauauaucaagg

SEQ ID NO: 3074 - RNA, 19 nt, Artificial Sequence
  Description of Artificial Sequence:  siNA antisense region
cuacaugcguugaugcauu

SEQ ID NO: 3075 - RNA, 19 nt, Artificial Sequence
  Description of Artificial Sequence:  siNA antisense region
caacaucucauaauaauuc

SEQ ID NO: 3076 - RNA, 19 nt, Artificial Sequence
  Description of Artificial Sequence:  siNA antisense region
uugcacuuccaacaaagcc

SEQ ID NO: 3077 - RNA, 19 nt, Artificial Sequence
  Description of Artificial Sequence:  siNA antisense region
aguaauggguucuuggauu

SEQ ID NO: 3078 - RNA, 19 nt, Artificial Sequence
  Description of Artificial Sequence:  siNA antisense region
aaguaguuggcaucauaaa

SEQ ID NO: 3079 - RNA, 19 nt, Artificial Sequence
  Description of Artificial Sequence:  siNA antisense region
ugugugugccagcaaacaa

SEQ ID NO: 3080 - RNA, 19 nt, Artificial Sequence
  Description of Artificial Sequence:  siNA antisense region
auacaguagucauaguuau

SEQ ID NO: 3081 - RNA, 19 nt, Artificial Sequence
  Description of Artificial Sequence:  siNA antisense region
gugacacuguuauauggua

SEQ ID NO: 3082 - RNA, 19 nt, Artificial Sequence
  Description of Artificial Sequence:  siNA antisense region
guaacgacaauuguaucug

SEQ ID NO: 3083 - RNA, 19 nt, Artificial Sequence
  Description of Artificial Sequence:  siNA antisense region
gaaaugccgucaccuucag

SEQ ID NO: 3084 - RNA, 19 nt, Artificial Sequence
  Description of Artificial Sequence:  siNA antisense region
ucuuugaguuuugguguug

SEQ ID NO: 3085 - RNA, 19 nt, Artificial Sequence
  Description of Artificial Sequence:  siNA antisense region
ccaccaauuugguagucuu

SEQ ID NO: 3086 - RNA, 19 nt, Artificial Sequence
  Description of Artificial Sequence:  siNA antisense region
ugccuauccucagaauaac

SEQ ID NO: 3087 - RNA, 19 nt, Artificial Sequence
  Description of Artificial Sequence:  siNA antisense region
uagucuuuaacaccugagu

SEQ ID NO: 3088 - RNA, 19 nt, Artificial Sequence
  Description of Artificial Sequence:  siNA antisense region
uagccauguacaacgacau

SEQ ID NO: 3089 - RNA, 19 nt, Artificial Sequence
  Description of Artificial Sequence:  siNA antisense region
uaguaaacuucggugaaau

SEQ ID NO: 3090 - RNA, 19 nt, Artificial Sequence
  Description of Artificial Sequence:  siNA antisense region
uguguagacucaagcuggu

SEQ ID NO: 3091 - RNA, 19 nt, Artificial Sequence
  Description of Artificial Sequence:  siNA antisense region
ccagugucuguaguaauuu

SEQ ID NO: 3092 - RNA, 19 nt, Artificial Sequence
  Description of Artificial Sequence:  siNA antisense region
aauguagcauuuucaauac

SEQ ID NO: 3093 - RNA, 19 nt, Artificial Sequence
  Description of Artificial Sequence:  siNA antisense region
agcuuguuaaagaugaaga

SEQ ID NO: 3094 - RNA, 19 nt, Artificial Sequence
  Description of Artificial Sequence:  siNA antisense region
uucggugggucuuuaacaa

SEQ ID NO: 3095 - RNA, 19 nt, Artificial Sequence
  Description of Artificial Sequence:  siNA antisense region
auuguguguauuugcacau

SEQ ID NO: 3096 - RNA, 19 nt, Artificial Sequence
  Description of Artificial Sequence:  siNA antisense region
acuccugaagagccgucga

SEQ ID NO: 3097 - RNA, 19 nt, Artificial Sequence
  Description of Artificial Sequence:  siNA antisense region
uccauugcuggauuagcaa

SEQ ID NO: 3098 - RNA, 19 nt, Artificial Sequence
  Description of Artificial Sequence:  siNA antisense region
ggcucaucauaaauuggau

SEQ ID NO: 3099 - RNA, 19 nt, Artificial Sequence
  Description of Artificial Sequence:  siNA antisense region
acgcuaguagucgucgucg

SEQ ID NO: 3100 - RNA, 19 nt, Artificial Sequence
  Description of Artificial Sequence:  siNA antisense region
ucuugugcuuacaaaggca

SEQ ID NO: 3101 - RNA, 19 nt, Artificial Sequence
  Description of Artificial Sequence:  siNA antisense region
auaaguucguacucacuuu

SEQ ID NO: 3102 - RNA, 19 nt, Artificial Sequence
  Description of Artificial Sequence:  siNA antisense region
uccgaaacgaaugaguaca

SEQ ID NO: 3103 - RNA, 19 nt, Artificial Sequence
  Description of Artificial Sequence:  siNA antisense region
auuaacguaccuguuucuu

SEQ ID NO: 3104 - RNA, 19 nt, Artificial Sequence
  Description of Artificial Sequence:  siNA antisense region
agaaguacgcuauuaacua

SEQ ID NO: 3105 - RNA, 19 nt, Artificial Sequence
  Description of Artificial Sequence:  siNA antisense region
accacgaaagcaagaaaaa

SEQ ID NO: 3106 - RNA, 19 nt, Artificial Sequence
  Description of Artificial Sequence:  siNA antisense region
agugugacuagcaagaaua

SEQ ID NO: 3107 - RNA, 19 nt, Artificial Sequence
  Description of Artificial Sequence:  siNA antisense region
agcgcaguaaggauggcua

SEQ ID NO: 3108 - RNA, 19 nt, Artificial Sequence
  Description of Artificial Sequence:  siNA antisense region
caguacgcacacaaucgaa

SEQ ID NO: 3109 - RNA, 19 nt, Artificial Sequence
  Description of Artificial Sequence:  siNA antisense region
acguuaacaauauugcagc

SEQ ID NO: 3110 - RNA, 19 nt, Artificial Sequence
  Description of Artificial Sequence:  siNA antisense region
guugguuuuacuaaacuca

SEQ ID NO: 3111 - RNA, 19 nt, Artificial Sequence
  Description of Artificial Sequence:  siNA antisense region
cgcgaguagacguaaaccg

SEQ ID NO: 3112 - RNA, 19 nt, Artificial Sequence
  Description of Artificial Sequence:  siNA antisense region
gaguucagauuuuuaacac

SEQ ID NO: 3113 - RNA, 19 nt, Artificial Sequence
  Description of Artificial Sequence:  siNA antisense region
ucaggaacuccuucagaag

SEQ ID NO: 3114 - RNA, 19 nt, Artificial Sequence
  Description of Artificial Sequence:  siNA antisense region
uucguuuagaccagaagau

SEQ ID NO: 3115 - RNA, 19 nt, Artificial Sequence
  Description of Artificial Sequence:  siNA antisense region
aauaauaauaauaguuagu

SEQ ID NO: 3116 - RNA, 19 nt, Artificial Sequence
  Description of Artificial Sequence:  siNA antisense region
uguuaaaguuccaaacaga

SEQ ID NO: 3117 - RNA, 19 nt, Artificial Sequence
  Description of Artificial Sequence:  siNA antisense region
gucugccaugauaagcaau

SEQ ID NO: 3118 - RNA, 19 nt, Artificial Sequence
  Description of Artificial Sequence:  siNA antisense region
aacgguaauaguaccguug

SEQ ID NO: 3119 - RNA, 19 nt, Artificial Sequence
  Description of Artificial Sequence:  siNA antisense region
gaguuguuuaagcuccuca

SEQ ID NO: 3120 - RNA, 19 nt, Artificial Sequence
  Description of Artificial Sequence:  siNA antisense region
uagguuccauuguuccagg

SEQ ID NO: 3121 - RNA, 19 nt, Artificial Sequence
  Description of Artificial Sequence:  siNA antisense region
gaauaggaaaccuauuacu

SEQ ID NO: 3122 - RNA, 19 nt, Artificial Sequence
  Description of Artificial Sequence:  siNA antisense region
uaacauaauccaggcuagg

SEQ ID NO: 3123 - RNA, 19 nt, Artificial Sequence
  Description of Artificial Sequence:  siNA antisense region
agaauaggcaaauuguagu

SEQ ID NO: 3124 - RNA, 19 nt, Artificial Sequence
  Description of Artificial Sequence:  siNA antisense region
caaaaaccuguuccgauua

SEQ ID NO: 3125 - RNA, 19 nt, Artificial Sequence
  Description of Artificial Sequence:  siNA antisense region
aacaagcuuuauuauguac

SEQ ID NO: 3126 - RNA, 19 nt, Artificial Sequence
  Description of Artificial Sequence:  siNA antisense region
ccacaagagccagaggaaa

SEQ ID NO: 3127 - RNA, 19 nt, Artificial Sequence
  Description of Artificial Sequence:  siNA antisense region
acaagcaaguguuacuggc

SEQ ID NO: 3128 - RNA, 19 nt, Artificial Sequence
  Description of Artificial Sequence:  siNA antisense region
gacagcagcaagcacaaaa

SEQ ID NO: 3129 - RNA, 19 nt, Artificial Sequence
  Description of Artificial Sequence:  siNA antisense region
cacccaauuaauucuguag

SEQ ID NO: 3130 - RNA, 19 nt, Artificial Sequence
  Description of Artificial Sequence:  siNA antisense region
aaucgcaaucccgccaguc

SEQ ID NO: 3131 - RNA, 19 nt, Artificial Sequence
  Description of Artificial Sequence:  siNA antisense region
uacaauacaagccauugca

SEQ ID NO: 3132 - RNA, 19 nt, Artificial Sequence
  Description of Artificial Sequence:  siNA antisense region
gcuaagccacaucaagccu

SEQ ID NO: 3133 - RNA, 19 nt, Artificial Sequence
  Description of Artificial Sequence:  siNA antisense region
gaaggaagcaacgaaguag

SEQ ID NO: 3134 - RNA, 19 nt, Artificial Sequence
  Description of Artificial Sequence:  siNA antisense region
gguacgagcaaacagccug

SEQ ID NO: 3135 - RNA, 19 nt, Artificial Sequence
  Description of Artificial Sequence:  siNA antisense region
gaaugaccacauugagcgg

SEQ ID NO: 3136 - RNA, 19 nt, Artificial Sequence
  Description of Artificial Sequence:  siNA antisense region
aauguuuguuucuggguug

SEQ ID NO: 3137 - RNA, 19 nt, Artificial Sequence
  Description of Artificial Sequence:  siNA antisense region
gagaggcacauugagaaga

SEQ ID NO: 3138 - RNA, 19 nt, Artificial Sequence
  Description of Artificial Sequence:  siNA antisense region
ggucacaauugucccccgg

SEQ ID NO: 3139 - RNA, 19 nt, Artificial Sequence
  Description of Artificial Sequence:  siNA antisense region
acuuuccaugagcggucug

SEQ ID NO: 3140 - RNA, 19 nt, Artificial Sequence
  Description of Artificial Sequence:  siNA antisense region
agcaccaaugacaaguuca

SEQ ID NO: 3141 - RNA, 19 nt, Artificial Sequence
  Description of Artificial Sequence:  siNA antisense region
gugaccacgaaugaucaca

SEQ ID NO: 3142 - RNA, 19 nt, Artificial Sequence
  Description of Artificial Sequence:  siNA antisense region
guguccggccauucgcaag

SEQ ID NO: 3143 - RNA, 19 nt, Artificial Sequence
  Description of Artificial Sequence:  siNA antisense region
gucacagcgcccuagggag

SEQ ID NO: 3144 - RNA, 19 nt, Artificial Sequence
  Description of Artificial Sequence:  siNA antisense region
uuuuggcagguccuuaaug

SEQ ID NO: 3145 - RNA, 19 nt, Artificial Sequence
  Description of Artificial Sequence:  siNA antisense region
uguagccacagugaucucu

SEQ ID NO: 3146 - RNA, 19 nt, Artificial Sequence
  Description of Artificial Sequence:  siNA antisense region
auaagaaagcguucgugau

SEQ ID NO: 3147 - RNA, 19 nt, Artificial Sequence
  Description of Artificial Sequence:  siNA antisense region
cgacgcuccuaauuuguaa

SEQ ID NO: 3148 - RNA, 19 nt, Artificial Sequence
  Description of Artificial Sequence:  siNA antisense region
aucagugccuacacgcugc

SEQ ID NO: 3149 - RNA, 19 nt, Artificial Sequence
  Description of Artificial Sequence:  siNA antisense region
guaugcagcaaaaccugaa

SEQ ID NO: 3150 - RNA, 19 nt, Artificial Sequence
  Description of Artificial Sequence:  siNA antisense region
uccaauacgguagcgguug

SEQ ID NO: 3151 - RNA, 19 nt, Artificial Sequence
  Description of Artificial Sequence:  siNA antisense region
uguauuuaauuuauaguuu

SEQ ID NO: 3152 - RNA, 19 nt, Artificial Sequence
  Description of Artificial Sequence:  siNA antisense region
guugcuaccggcguggucu

SEQ ID NO: 3153 - RNA, 19 nt, Artificial Sequence
  Description of Artificial Sequence:  siNA antisense region
uagcaaagcaauauugucg

SEQ ID NO: 3154 - RNA, 19 nt, Artificial Sequence
  Description of Artificial Sequence:  siNA antisense region
uguugucacuuacuguacu

SEQ ID NO: 3155 - RNA, 19 nt, Artificial Sequence
  Description of Artificial Sequence:  siNA antisense region
ucaacaagaugaaacaucu

SEQ ID NO: 3156 - RNA, 19 nt, Artificial Sequence
  Description of Artificial Sequence:  siNA antisense region
gcuauuguaaccuggaagu

SEQ ID NO: 3157 - RNA, 19 nt, Artificial Sequence
  Description of Artificial Sequence:  siNA antisense region
augauaaucaauaucucug

SEQ ID NO: 3158 - RNA, 19 nt, Artificial Sequence
  Description of Artificial Sequence:  siNA antisense region
auccugaaaguccucauaa

SEQ ID NO: 3159 - RNA, 19 nt, Artificial Sequence
  Description of Artificial Sequence:  siNA antisense region
ucaagauuccaaauagcaa

SEQ ID NO: 3160 - RNA, 19 nt, Artificial Sequence
  Description of Artificial Sequence:  siNA antisense region
auugaacuuauuauaacgu

SEQ ID NO: 3161 - RNA, 19 nt, Artificial Sequence
  Description of Artificial Sequence:  siNA antisense region
uuaaauaauugucucacua

SEQ ID NO: 3162 - RNA, 19 nt, Artificial Sequence
  Description of Artificial Sequence:  siNA antisense region
uucuucuuaguuagaggcu

SEQ ID NO: 3163 - RNA, 19 nt, Artificial Sequence
  Description of Artificial Sequence:  siNA antisense region
ucaucuaacuccgaauaau

SEQ ID NO: 3164 - RNA, 19 nt, Artificial Sequence
  Description of Artificial Sequence:  siNA antisense region
aacuccauagguucuucau

SEQ ID NO: 3165 - RNA, 19 nt, Artificial Sequence
  Description of Artificial Sequence:  siNA antisense region
ucguuuuauggauaaucua

SEQ ID NO: 3166 - RNA, 19 nt, Artificial Sequence
  Description of Artificial Sequence:  siNA antisense region
agagaauaauuuucauguu

SEQ ID NO: 3167 - RNA, 19 nt, Artificial Sequence
  Description of Artificial Sequence:  siNA antisense region
auacaaucaaugucaggaa

SEQ ID NO: 3168 - RNA, 19 nt, Artificial Sequence
  Description of Artificial Sequence:  siNA antisense region
auagcucgcaagauguaaa

SEQ ID NO: 3169 - RNA, 19 nt, Artificial Sequence
  Description of Artificial Sequence:  siNA antisense region
cacacuccugauagugaua

SEQ ID NO: 3170 - RNA, 19 nt, Artificial Sequence
  Description of Artificial Sequence:  siNA antisense region
guacagucguaccucuaac

SEQ ID NO: 3171 - RNA, 19 nt, Artificial Sequence
  Description of Artificial Sequence:  siNA antisense region
ggcaagguucuuuuaguag

SEQ ID NO: 3172 - RNA, 19 nt, Artificial Sequence
  Description of Artificial Sequence:  siNA antisense region
ccucguauguuccugaugg

SEQ ID NO: 3173 - RNA, 19 nt, Artificial Sequence
  Description of Artificial Sequence:  siNA antisense region
ggugaaauggugaauugcc

SEQ ID NO: 3174 - RNA, 19 nt, Artificial Sequence
  Description of Artificial Sequence:  siNA antisense region
auuuauugucagcaagagg

SEQ ID NO: 3175 - RNA, 19 nt, Artificial Sequence
  Description of Artificial Sequence:  siNA antisense region
uagugcaaguuagugcaaa

SEQ ID NO: 3176 - RNA, 19 nt, Artificial Sequence
  Description of Artificial Sequence:  siNA antisense region
caaaagcaaagugugugcu

SEQ ID NO: 3177 - RNA, 19 nt, Artificial Sequence
  Description of Artificial Sequence:  siNA antisense region
gaguaccgucagcacaagc

SEQ ID NO: 3178 - RNA, 19 nt, Artificial Sequence
  Description of Artificial Sequence:  siNA antisense region
gcagcugauagguaugucg

SEQ ID NO: 3179 - RNA, 19 nt, Artificial Sequence
  Description of Artificial Sequence:  siNA antisense region
gugaaacugaucuugcacg

SEQ ID NO: 3180 - RNA, 19 nt, Artificial Sequence
  Description of Artificial Sequence:  siNA antisense region
gucugaugaaaaguuuugg

SEQ ID NO: 3181 - RNA, 19 nt, Artificial Sequence
  Description of Artificial Sequence:  siNA antisense region
cuuguugaaccuccucuug

SEQ ID NO: 3182 - RNA, 19 nt, Artificial Sequence
  Description of Artificial Sequence:  siNA antisense region
aaaguggcgaguagagcuc

SEQ ID NO: 3183 - RNA, 19 nt, Artificial Sequence
  Description of Artificial Sequence:  siNA antisense region
gagcagcaacaaugagaaa

SEQ ID NO: 3184 - RNA, 19 nt, Artificial Sequence
  Description of Artificial Sequence:  siNA antisense region
aaaguauuaaaaauacuag

SEQ ID NO: 3185 - RNA, 19 nt, Artificial Sequence
  Description of Artificial Sequence:  siNA antisense region
uucucuuaauggugaagca

SEQ ID NO: 3186 - RNA, 19 nt, Artificial Sequence
  Description of Artificial Sequence:  siNA antisense region
agcucauucauucugucuu

SEQ ID NO: 3187 - RNA, 19 nt, Artificial Sequence
  Description of Artificial Sequence:  siNA antisense region
uagaagucaauuaaaguga

SEQ ID NO: 3188 - RNA, 19 nt, Artificial Sequence
  Description of Artificial Sequence:  siNA antisense region
aaggcuaaaaagcacaaau

SEQ ID NO: 3189 - RNA, 19 nt, Artificial Sequence
  Description of Artificial Sequence:  siNA antisense region
aaaacaaggaauagcagaa

SEQ ID NO: 3190 - RNA, 19 nt, Artificial Sequence
  Description of Artificial Sequence:  siNA antisense region
aauauaauaagcauuauua

SEQ ID NO: 3191 - RNA, 19 nt, Artificial Sequence
  Description of Artificial Sequence:  siNA antisense region
auuucgagugaaaaccaaa

SEQ ID NO: 3192 - RNA, 19 nt, Artificial Sequence
  Description of Artificial Sequence:  siNA antisense region
gguucuucuagauccugga

SEQ ID NO: 3193 - RNA, 19 nt, Artificial Sequence
  Description of Artificial Sequence:  siNA antisense region
guuuagacuuugguacaag

SEQ ID NO: 3194 - RNA, 19 nt, Artificial Sequence
  Description of Artificial Sequence:  siNA antisense region
augagaaguuucauguucg

SEQ ID NO: 3195 - RNA, 19 nt, Artificial Sequence
  Description of Artificial Sequence:  siNA antisense region
gaaauacaagucaaaacaa

SEQ ID NO: 3196 - RNA, 19 nt, Artificial Sequence
  Description of Artificial Sequence:  siNA antisense region
cauaugcaacugcauagag

SEQ ID NO: 3197 - RNA, 19 nt, Artificial Sequence
  Description of Artificial Sequence:  siNA antisense region
cagcgcuguacuacagugc

SEQ ID NO: 3198 - RNA, 19 nt, Artificial Sequence
  Description of Artificial Sequence:  siNA antisense region
ugagguuuauuagaugcac

SEQ ID NO: 3199 - RNA, 19 nt, Artificial Sequence
  Description of Artificial Sequence:  siNA antisense region
caaggaucuucaagcacau

SEQ ID NO: 3200 - RNA, 19 nt, Artificial Sequence
  Description of Artificial Sequence:  siNA antisense region
cccuaguguuguaccuuac

SEQ ID NO: 3201 - RNA, 19 nt, Artificial Sequence
  Description of Artificial Sequence:  siNA antisense region
cagugcuauaaguauuacc

SEQ ID NO: 3202 - RNA, 19 nt, Artificial Sequence
  Description of Artificial Sequence:  siNA antisense region
cuagagcacaaagccaagc

SEQ ID NO: 3203 - RNA, 19 nt, Artificial Sequence
  Description of Artificial Sequence:  siNA antisense region
gaaaagguaaaaccuuucc

SEQ ID NO: 3204 - RNA, 19 nt, Artificial Sequence
  Description of Artificial Sequence:  siNA antisense region
ccauagugugccaucuaug

SEQ ID NO: 3205 - RNA, 19 nt, Artificial Sequence
  Description of Artificial Sequence:  siNA antisense region
uaggugugcauguuugaac

SEQ ID NO: 3206 - RNA, 19 nt, Artificial Sequence
  Description of Artificial Sequence:  siNA antisense region
gacaguugauaguaacauu

SEQ ID NO: 3207 - RNA, 19 nt, Artificial Sequence
  Description of Artificial Sequence:  siNA antisense region
caccaccagcuggaucuug

SEQ ID NO: 3208 - RNA, 19 nt, Artificial Sequence
  Description of Artificial Sequence:  siNA antisense region
aacaccuagcuauaagcgc

SEQ ID NO: 3209 - RNA, 19 nt, Artificial Sequence
  Description of Artificial Sequence:  siNA antisense region
gaccuucaugaagguacca

SEQ ID NO: 3210 - RNA, 19 nt, Artificial Sequence
  Description of Artificial Sequence:  siNA antisense region
uaaaugcagcaguuuggug

SEQ ID NO: 3211 - RNA, 19 nt, Artificial Sequence
  Description of Artificial Sequence:  siNA antisense region
aaacaacaaguacgucucu

SEQ ID NO: 3212 - RNA, 19 nt, Artificial Sequence
  Description of Artificial Sequence:  siNA antisense region
aauuuguucguuuauuuaa

SEQ ID NO: 3213 - RNA, 19 nt, Artificial Sequence
  Description of Artificial Sequence:  siNA antisense region
uccauuaucagacauuuua

SEQ ID NO: 3214 - RNA, 19 nt, Artificial Sequence
  Description of Artificial Sequence:  siNA antisense region
acguugguuugauuggggu

SEQ ID NO: 3215 - RNA, 19 nt, Artificial Sequence
  Description of Artificial Sequence:  siNA antisense region
uguaaugcggggggcacua

SEQ ID NO: 3216 - RNA, 19 nt, Artificial Sequence
  Description of Artificial Sequence:  siNA antisense region
aucuguggguccaccaaau

SEQ ID NO: 3217 - RNA, 19 nt, Artificial Sequence
  Description of Artificial Sequence:  siNA antisense region
cugguuauugucaguugaa

SEQ ID NO: 3218 - RNA, 19 nt, Artificial Sequence
  Description of Artificial Sequence:  siNA antisense region
cccauugcguccuccauuc

SEQ ID NO: 3219 - RNA, 19 nt, Artificial Sequence
  Description of Artificial Sequence:  siNA antisense region
gcgcuguuuuggccuugcc

SEQ ID NO: 3220 - RNA, 19 nt, Artificial Sequence
  Description of Artificial Sequence:  siNA antisense region
ggguaaaccuuggggucgg

SEQ ID NO: 3221 - RNA, 19 nt, Artificial Sequence
  Description of Artificial Sequence:  siNA antisense region
ccaagacgcaguauuauug

SEQ ID NO: 3222 - RNA, 19 nt, Artificial Sequence
  Description of Artificial Sequence:  siNA antisense region
cugagugagagcugugaac

SEQ ID NO: 3223 - RNA, 19 nt, Artificial Sequence
  Description of Artificial Sequence:  siNA antisense region
aaguuccuccuugccaugc

SEQ ID NO: 3224 - RNA, 19 nt, Artificial Sequence
  Description of Artificial Sequence:  siNA antisense region
cuggccucgagggaaucua

SEQ ID NO: 3225 - RNA, 19 nt, Artificial Sequence
  Description of Artificial Sequence:  siNA antisense region
gguguugauuggaacgccc

SEQ ID NO: 3226 - RNA, 19 nt, Artificial Sequence
  Description of Artificial Sequence:  siNA antisense region
gucaucuggaccacuauug

SEQ ID NO: 3227 - RNA, 19 nt, Artificial Sequence
  Description of Artificial Sequence:  siNA antisense region
ucgguaguagccaauuugg

SEQ ID NO: 3228 - RNA, 19 nt, Artificial Sequence
  Description of Artificial Sequence:  siNA antisense region
aacucgucggguagcucuu

SEQ ID NO: 3229 - RNA, 19 nt, Artificial Sequence
  Description of Artificial Sequence:  siNA antisense region
uuugccgucaccaccacga

SEQ ID NO: 3230 - RNA, 19 nt, Artificial Sequence
  Description of Artificial Sequence:  siNA antisense region
ggggcugagcucuuucauu

SEQ ID NO: 3231 - RNA, 19 nt, Artificial Sequence
  Description of Artificial Sequence:  siNA antisense region
guaauagaaguaccaucug

SEQ ID NO: 3232 - RNA, 19 nt, Artificial Sequence
  Description of Artificial Sequence:  siNA antisense region
uucugggccaguuccuagg

SEQ ID NO: 3233 - RNA, 19 nt, Artificial Sequence
  Description of Artificial Sequence:  siNA antisense region
gccguagggaagugaagcu

SEQ ID NO: 3234 - RNA, 19 nt, Artificial Sequence
  Description of Artificial Sequence:  siNA antisense region
gaugccuucuuuguuagcg

SEQ ID NO: 3235 - RNA, 19 nt, Artificial Sequence
  Description of Artificial Sequence:  siNA antisense region
cucaguugcaacccauacg

SEQ ID NO: 3236 - RNA, 19 nt, Artificial Sequence
  Description of Artificial Sequence:  siNA antisense region
ggguguauucaaggcuccc

SEQ ID NO: 3237 - RNA, 19 nt, Artificial Sequence
  Description of Artificial Sequence:  siNA antisense region
ggugccaauguggucuuug

SEQ ID NO: 3238 - RNA, 19 nt, Artificial Sequence
  Description of Artificial Sequence:  siNA antisense region
auuguuauuaggauugcgg

SEQ ID NO: 3239 - RNA, 19 nt, Artificial Sequence
  Description of Artificial Sequence:  siNA antisense region
uuguagcacgguggcagca

SEQ ID NO: 3240 - RNA, 19 nt, Artificial Sequence
  Description of Artificial Sequence:  siNA antisense region
uguuguuccuugaggaagu

SEQ ID NO: 3241 - RNA, 19 nt, Artificial Sequence
  Description of Artificial Sequence:  siNA antisense region
guagaagccuuuuggcaau

SEQ ID NO: 3242 - RNA, 19 nt, Artificial Sequence
  Description of Artificial Sequence:  siNA antisense region
gccucugcuucccucugcg

SEQ ID NO: 3243 - RNA, 19 nt, Artificial Sequence
  Description of Artificial Sequence:  siNA antisense region
agaagaggcuugacugccg

SEQ ID NO: 3244 - RNA, 19 nt, Artificial Sequence
  Description of Artificial Sequence:  siNA antisense region
acuacgugaugaggagcga

SEQ ID NO: 3245 - RNA, 19 nt, Artificial Sequence
  Description of Artificial Sequence:  siNA antisense region
auuucuugaauuaccgcga

SEQ ID NO: 3246 - RNA, 19 nt, Artificial Sequence
  Description of Artificial Sequence:  siNA antisense region
acugcugccaggaguugaa

SEQ ID NO: 3247 - RNA, 19 nt, Artificial Sequence
  Description of Artificial Sequence:  siNA antisense region
agcaggagaauuuccccua

SEQ ID NO: 3248 - RNA, 19 nt, Artificial Sequence
  Description of Artificial Sequence:  siNA antisense region
accuccgcuagccauucga

SEQ ID NO: 3249 - RNA, 19 nt, Artificial Sequence
  Description of Artificial Sequence:  siNA antisense region
cgcgagggcaguuucacca

SEQ ID NO: 3250 - RNA, 19 nt, Artificial Sequence
  Description of Artificial Sequence:  siNA antisense region
ucugucuagcagcaauagc

SEQ ID NO: 3251 - RNA, 19 nt, Artificial Sequence
  Description of Artificial Sequence:  siNA antisense region
gcucucaagcugguucaau

SEQ ID NO: 3252 - RNA, 19 nt, Artificial Sequence
  Description of Artificial Sequence:  siNA antisense region
gccuuuaccagaaacuuug

SEQ ID NO: 3253 - RNA, 19 nt, Artificial Sequence
  Description of Artificial Sequence:  siNA antisense region
uuggccuuguuguuguugg

SEQ ID NO: 3254 - RNA, 19 nt, Artificial Sequence
  Description of Artificial Sequence:  siNA antisense region
agauuucuuagugacaguu

SEQ ID NO: 3255 - RNA, 19 nt, Artificial Sequence
  Description of Artificial Sequence:  siNA antisense region
uuuagaugccucagcagca

SEQ ID NO: 3256 - RNA, 19 nt, Artificial Sequence
  Description of Artificial Sequence:  siNA antisense region
acguuuuuggcgaggcuuu

SEQ ID NO: 3257 - RNA, 19 nt, Artificial Sequence
  Description of Artificial Sequence:  siNA antisense region
guacuguuuuguggcagua

SEQ ID NO: 3258 - RNA, 19 nt, Artificial Sequence
  Description of Artificial Sequence:  siNA antisense region
aaaugcuugagugacguug

SEQ ID NO: 3259 - RNA, 19 nt, Artificial Sequence
  Description of Artificial Sequence:  siNA antisense region
uucuggaccacgucuccca

SEQ ID NO: 3260 - RNA, 19 nt, Artificial Sequence
  Description of Artificial Sequence:  siNA antisense region
gaaauuuccuuggguuugu

SEQ ID NO: 3261 - RNA, 19 nt, Artificial Sequence
  Description of Artificial Sequence:  siNA antisense region
gauuaggucuugguccccg

SEQ ID NO: 3262 - RNA, 19 nt, Artificial Sequence
  Description of Artificial Sequence:  siNA antisense region
guaaucaguuccuugucug

SEQ ID NO: 3263 - RNA, 19 nt, Artificial Sequence
  Description of Artificial Sequence:  siNA antisense region
aauuugcggccaauguuug

SEQ ID NO: 3264 - RNA, 19 nt, Artificial Sequence
  Description of Artificial Sequence:  siNA antisense region
acuuggagcaaauugugca

SEQ ID NO: 3265 - RNA, 19 nt, Artificial Sequence
  Description of Artificial Sequence:  siNA antisense region
uccaaagaaugcagaggca

SEQ ID NO: 3266 - RNA, 19 nt, Artificial Sequence
  Description of Artificial Sequence:  siNA antisense region
caugccaaugcgugacauu

SEQ ID NO: 3267 - RNA, 19 nt, Artificial Sequence
  Description of Artificial Sequence:  siNA antisense region
ucccgaaggugugacuucc

SEQ ID NO: 3268 - RNA, 19 nt, Artificial Sequence
  Description of Artificial Sequence:  siNA antisense region
augauaagucagccauguu

SEQ ID NO: 3269 - RNA, 19 nt, Artificial Sequence
  Description of Artificial Sequence:  siNA antisense region
auccaauuuaauggcucca

SEQ ID NO: 3270 - RNA, 19 nt, Artificial Sequence
  Description of Artificial Sequence:  siNA antisense region
gaauuguggaucuuuguca

SEQ ID NO: 3271 - RNA, 19 nt, Artificial Sequence
  Description of Artificial Sequence:  siNA antisense region
caguaugacguugucuuug

SEQ ID NO: 3272 - RNA, 19 nt, Artificial Sequence
  Description of Artificial Sequence:  siNA antisense region
gucaaugugcuuguucagc

SEQ ID NO: 3273 - RNA, 19 nt, Artificial Sequence
  Description of Artificial Sequence:  siNA antisense region
ugggaauguuuuguaugcg

SEQ ID NO: 3274 - RNA, 19 nt, Artificial Sequence
  Description of Artificial Sequence:  siNA antisense region
cuuuuuaggcucuguuggu

SEQ ID NO: 3275 - RNA, 19 nt, Artificial Sequence
  Description of Artificial Sequence:  siNA antisense region
agucuuuuucuuuuugucc

SEQ ID NO: 3276 - RNA, 19 nt, Artificial Sequence
  Description of Artificial Sequence:  siNA antisense region
caaaggcugagcuucauca

SEQ ID NO: 3277 - RNA, 19 nt, Artificial Sequence
  Description of Artificial Sequence:  siNA antisense region
cuucuuuugucucugcggc

SEQ ID NO: 3278 - RNA, 19 nt, Artificial Sequence
  Description of Artificial Sequence:  siNA antisense region
aagagucacagugggcugc

SEQ ID NO: 3279 - RNA, 19 nt, Artificial Sequence
  Description of Artificial Sequence:  siNA antisense region
caugucagccgcaggaaga

SEQ ID NO: 3280 - RNA, 19 nt, Artificial Sequence
  Description of Artificial Sequence:  siNA antisense region
uugucuggagaaaucaucc

SEQ ID NO: 3281 - RNA, 19 nt, Artificial Sequence
  Description of Artificial Sequence:  siNA antisense region
acucauggaauuuugaagu

SEQ ID NO: 3282 - RNA, 19 nt, Artificial Sequence
  Description of Artificial Sequence:  siNA antisense region
ugaaucagcagaagcucca

SEQ ID NO: 3283 - RNA, 19 nt, Artificial Sequence
  Description of Artificial Sequence:  siNA antisense region
gaguguuuaugccugaguu

SEQ ID NO: 3284 - RNA, 19 nt, Artificial Sequence
  Description of Artificial Sequence:  siNA antisense region
gccuuguguggucaucaug

SEQ ID NO: 3285 - RNA, 19 nt, Artificial Sequence
  Description of Artificial Sequence:  siNA antisense region
cguuuacauagcccaucug

SEQ ID NO: 3286 - RNA, 19 nt, Artificial Sequence
  Description of Artificial Sequence:  siNA antisense region
uaaacggaauugcgaaaac

SEQ ID NO: 3287 - RNA, 19 nt, Artificial Sequence
  Description of Artificial Sequence:  siNA antisense region
agaguagacuauguaucgu

SEQ ID NO: 3288 - RNA, 19 nt, Artificial Sequence
  Description of Artificial Sequence:  siNA antisense region
gagaauucauucugcacaa

SEQ ID NO: 3289 - RNA, 19 nt, Artificial Sequence
  Description of Artificial Sequence:  siNA antisense region
cuugugcuguuuaguuacg

SEQ ID NO: 3290 - RNA, 19 nt, Artificial Sequence
  Description of Artificial Sequence:  siNA antisense region
uaaaguuaacuaaaccuac

SEQ ID NO: 3291 - RNA, 19 nt, Artificial Sequence
  Description of Artificial Sequence:  siNA antisense region
aagauugcuaugugagauu

SEQ ID NO: 3292 - RNA, 19 nt, Artificial Sequence
  Description of Artificial Sequence:  siNA antisense region
aauguuacacauugauuaa

SEQ ID NO: 3293 - RNA, 19 nt, Artificial Sequence
  Description of Artificial Sequence:  siNA antisense region
cucuuucaaguccucccua

SEQ ID NO: 3294 - RNA, 19 nt, Artificial Sequence
  Description of Artificial Sequence:  siNA antisense region
ucgaugaaaaugugguggc

SEQ ID NO: 3295 - RNA, 19 nt, Artificial Sequence
  Description of Artificial Sequence:  siNA antisense region
aucguacuccgcguggccu

SEQ ID NO: 3296 - RNA, 19 nt, Artificial Sequence
  Description of Artificial Sequence:  siNA antisense region
uuauucacuguacccucga

SEQ ID NO: 3297 - RNA, 19 nt, Artificial Sequence
  Description of Artificial Sequence:  siNA antisense region
aggcagcucucccuagcau

SEQ ID NO: 3298 - RNA, 19 nt, Artificial Sequence
  Description of Artificial Sequence:  siNA antisense region
auuagggcucuuccauaua

SEQ ID NO: 3299 - RNA, 19 nt, Artificial Sequence
  Description of Artificial Sequence:  siNA antisense region
cuaaaauuaauuuuacaca

SEQ ID NO: 3300 - RNA, 19 nt, Artificial Sequence
  Description of Artificial Sequence:  siNA antisense region
cacauggggauagcacuac

SEQ ID NO: 3301 - RNA, 19 nt, Artificial Sequence
  Description of Artificial Sequence:  siNA antisense region
cuaagaagcuauuaaaauc

SEQ ID NO: 3302 - RNA, 19 nt, Artificial Sequence
  Description of Artificial Sequence:  siNA antisense region
uuuuuuuuugucauucucc

SEQ ID NO: 3303 - RNA, 23 nt, Artificial Sequence
  Description of Artificial Sequence:  siNA antisense region
ugaaugaagagguugccaucauu

SEQ ID NO: 3304 - RNA, 23 nt, Artificial Sequence
  Description of Artificial Sequence:  siNA antisense region
uguugcaucuccacaggagugua

SEQ ID NO: 3305 - RNA, 23 nt, Artificial Sequence
  Description of Artificial Sequence:  siNA antisense region
cucaaagcaagggacuuuaccgu

SEQ ID NO: 3306 - RNA, 23 nt, Artificial Sequence
  Description of Artificial Sequence:  siNA antisense region
cuguguaaauggccucaugcucu

SEQ ID NO: 3307 - RNA, 23 nt, Artificial Sequence
  Description of Artificial Sequence:  siNA antisense region
uuugugcuugcugcugucuacag

SEQ ID NO: 3308 - RNA, 23 nt, Artificial Sequence
  Description of Artificial Sequence:  siNA antisense region
acuugucauuggugcugugauca

SEQ ID NO: 3309 - RNA, 23 nt, Artificial Sequence
  Description of Artificial Sequence:  siNA antisense region
uugaaccagcuugagagcaaagu

SEQ ID NO: 3310 - RNA, 23 nt, Artificial Sequence
  Description of Artificial Sequence:  siNA antisense region
gcuuguuuuccucuggcucuugu

SEQ ID NO: 3311 - DNA, 21 bp, Artificial sequence
  Description of Artificial Sequence:  siNA sense region
  misc_feature (1)..(19): ribonucleotide unmodified or modified as described for this sequence
aaugaagagguugccaucatt

SEQ ID NO: 3312 - DNA, 21 bp, Artificial sequence
  Description of Artificial Sequence:  siNA sense region
  misc_feature (1)..(19): ribonucleotide unmodified or modified as described for this sequence
uugcaucuccacaggagugtt

SEQ ID NO: 3313 - DNA, 21 bp, Artificial sequence
  Description of Artificial Sequence:  siNA sense region
  misc_feature (1)..(19): ribonucleotide unmodified or modified as described for this sequence
caaagcaagggacuuuacctt

SEQ ID NO: 3314 - DNA, 21 bp, Artificial sequence
  Description of Artificial Sequence:  siNA sense region
  misc_feature (1)..(19): ribonucleotide unmodified or modified as described for this sequence
guguaaauggccucaugcutt

SEQ ID NO: 3315 - DNA, 21 bp, Artificial sequence
  Description of Artificial Sequence:  siNA sense region
  misc_feature (1)..(19): ribonucleotide unmodified or modified as described for this sequence
ugugcuugcugcugucuactt

SEQ ID NO: 3316 - DNA, 21 bp, Artificial sequence
  Description of Artificial Sequence:  siNA sense region
  misc_feature (1)..(19): ribonucleotide unmodified or modified as described for this sequence
uugucauuggugcugugautt

SEQ ID NO: 3317 - DNA, 21 bp, Artificial sequence
  Description of Artificial Sequence:  siNA sense region
  misc_feature (1)..(19): ribonucleotide unmodified or modified as described for this sequence
gaaccagcuugagagcaaatt

SEQ ID NO: 3318 - DNA, 21 bp, Artificial sequence
  Description of Artificial Sequence:  siNA sense region
  misc_feature (1)..(19): ribonucleotide unmodified or modified as described for this sequence
uuguuuuccucuggcucuutt

SEQ ID NO: 3319 - DNA, 21 bp, Artificial sequence
  Description of Artificial Sequence:  siNA antisense region
  misc_feature (1)..(19): ribonucleotide unmodified or modified as described for this sequence
ugauggcaaccucuucauutt

SEQ ID NO: 3320 - DNA, 21 bp, Artificial sequence
  Description of Artificial Sequence:  siNA antisense region
  misc_feature (1)..(19): ribonucleotide unmodified or modified as described for this sequence
cacuccuguggagaugcaatt

SEQ ID NO: 3321 - DNA, 21 bp, Artificial sequence
  Description of Artificial Sequence:  siNA antisense region
  misc_feature (1)..(19): ribonucleotide unmodified or modified as described for this sequence
gguaaagucccuugcuuugtt

SEQ ID NO: 3322 - DNA, 21 bp, Artificial sequence
  Description of Artificial Sequence:  siNA antisense region
  misc_feature (1)..(19): ribonucleotide unmodified or modified as described for this sequence
agcaugaggccauuuacactt

SEQ ID NO: 3323 - DNA, 21 bp, Artificial sequence
  Description of Artificial Sequence:  siNA antisense region
  misc_feature (1)..(19): ribonucleotide unmodified or modified as described for this sequence
guagacagcagcaagcacatt

SEQ ID NO: 3324 - DNA, 21 bp, Artificial sequence
  Description of Artificial Sequence:  siNA antisense region
  misc_feature (1)..(19): ribonucleotide unmodified or modified as described for this sequence
aucacagcaccaaugacaatt

SEQ ID NO: 3325 - DNA, 21 bp, Artificial sequence
  Description of Artificial Sequence:  siNA antisense region
  misc_feature (1)..(19): ribonucleotide unmodified or modified as described for this sequence
uuugcucucaagcugguuctt

SEQ ID NO: 3326 - DNA, 21 bp, Artificial sequence
  Description of Artificial Sequence:  siNA antisense region
  misc_feature (1)..(19): ribonucleotide unmodified or modified as described for this sequence
aagagccagaggaaaacaatt

SEQ ID NO: 3327 - DNA, 21 bp, Artificial sequence
  Description of Artificial Sequence:  siNA sense region
  misc_feature (1)..(1): 5'-3 attached terminal deoxyabasic moiety
  misc_feature (3)..(3): 2'-deoxy-2'-fluoro
  misc_feature (11)..(12): 2'-deoxy-2'-fluoro
  misc_feature (14)..(15): 2'-deoxy-2'-fluoro
  misc_feature (17)..(18): 2'-deoxy-2'-fluoro
  misc_feature (1)..(19): ribonucleotide unmodified or modified as described for this sequence
  misc_feature (21)..(21): 3'-3 attached terminal deoxyabasic moiety
aaugaagagguugccaucatt

SEQ ID NO: 3328 - DNA, 21 bp, Artificial sequence
  Description of Artificial Sequence:  siNA sense region
  misc_feature (1)..(2): 2'-deoxy-2'-fluoro
  misc_feature (1)..(1): 5'-3 attached terminal deoxyabasic moiety
  misc_feature (4)..(4): 2'-deoxy-2'-fluoro
  misc_feature (6)..(10): 2'-deoxy-2'-fluoro
  misc_feature (12)..(12): 2'-deoxy-2'-fluoro
  misc_feature (18)..(18): 2'-deoxy-2'-fluoro
  misc_feature (1)..(19): ribonucleotide unmodified or modified as described for this sequence
  misc_feature (21)..(21): 3'-3 attached terminal deoxyabasic moiety
uugcaucuccacaggagugtt

SEQ ID NO: 3329 - DNA, 21 bp, Artificial sequence
  Description of Artificial Sequence:  siNA sense region
  misc_feature (1)..(1): 2'-deoxy-2'-fluoro
  misc_feature (1)..(1): 5'-3 attached terminal deoxyabasic moiety
  misc_feature (6)..(6): 2'-deoxy-2'-fluoro
  misc_feature (13)..(16): 2'-deoxy-2'-fluoro
  misc_feature (18)..(19): 2'-deoxy-2'-fluoro
  misc_feature (1)..(19): ribonucleotide unmodified or modified as described for this sequence
  misc_feature (21)..(21): 3'-3 attached terminal deoxyabasic moiety
caaagcaagggacuuuacctt

SEQ ID NO: 3330 - DNA, 21 bp, Artificial sequence
  Description of Artificial Sequence:  siNA sense region
  misc_feature (1)..(1): 5'-3 attached terminal deoxyabasic moiety
  misc_feature (2)..(2): 2'-deoxy-2'-fluoro
  misc_feature (4)..(4): 2'-deoxy-2'-fluoro
  misc_feature (8)..(8): 2'-deoxy-2'-fluoro
  misc_feature (11)..(14): 2'-deoxy-2'-fluoro
  misc_feature (16)..(16): 2'-deoxy-2'-fluoro
  misc_feature (18)..(19): 2'-deoxy-2'-fluoro
  misc_feature (1)..(19): ribonucleotide unmodified or modified as described for this sequence
  misc_feature (21)..(21): 3'-3 attached terminal deoxyabasic moiety
guguaaauggccucaugcutt

SEQ ID NO: 3331 - DNA, 21 bp, Artificial sequence
  Description of Artificial Sequence:  siNA sense region
  misc_feature (1)..(1): 2'-deoxy-2'-fluoro
  misc_feature (1)..(1): 5'-3 attached terminal deoxyabasic moiety
  misc_feature (3)..(3): 2'-deoxy-2'-fluoro
  misc_feature (5)..(7): 2'-deoxy-2'-fluoro
  misc_feature (9)..(10): 2'-deoxy-2'-fluoro
  misc_feature (12)..(13): 2'-deoxy-2'-fluoro
  misc_feature (15)..(17): 2'-deoxy-2'-fluoro
  misc_feature (19)..(19): 2'-deoxy-2'-fluoro
  misc_feature (1)..(19): ribonucleotide unmodified or modified as described for this sequence
  misc_feature (21)..(21): 3'-3 attached terminal deoxyabasic moiety
ugugcuugcugcugucuactt

SEQ ID NO: 3332 - DNA, 21 bp, Artificial sequence
  Description of Artificial Sequence:  siNA sense region
  misc_feature (1)..(2): 2'-deoxy-2'-fluoro
  misc_feature (1)..(1): 5'-3 attached terminal deoxyabasic moiety
  misc_feature (4)..(5): 2'-deoxy-2'-fluoro
  misc_feature (7)..(8): 2'-deoxy-2'-fluoro
  misc_feature (11)..(11): 2'-deoxy-2'-fluoro
  misc_feature (13)..(14): 2'-deoxy-2'-fluoro
  misc_feature (16)..(16): 2'-deoxy-2'-fluoro
  misc_feature (19)..(19): 2'-deoxy-2'-fluoro
  misc_feature (1)..(19): ribonucleotide unmodified or modified as described for this sequence
  misc_feature (21)..(21): 3'-3 attached terminal deoxyabasic moiety
uugucauuggugcugugautt

SEQ ID NO: 3333 - DNA, 21 bp, Artificial sequence
  Description of Artificial Sequence:  siNA sense region
  misc_feature: 2'-deoxy-2'-fluoro
  misc_feature (1)..(1): 5'-3 attached terminal deoxyabasic moiety
  misc_feature (4)..(5): 2'-deoxy-2'-fluoro
  misc_feature (8)..(10): 2'-deoxy-2'-fluoro
  misc_feature (16)..(16): 2'-deoxy-2'-fluoro
  misc_feature (1)..(19): ribonucleotide unmodified or modified as described for this sequence
  misc_feature (21)..(21): 3'-3 attached terminal deoxyabasic moiety
gaaccagcuugagagcaaatt

SEQ ID NO: 3334 - DNA, 21 bp, Artificial sequence
  Description of Artificial Sequence:  siNA sense region
  misc_feature (1)..(2): 2'-deoxy-2'-fluoro
  misc_feature (1)..(1): 5'-3 attached terminal deoxyabasic moiety
  misc_feature (4)..(12): 2'-deoxy-2'-fluoro
  misc_feature (15)..(19): 2'-deoxy-2'-fluoro
  misc_feature (1)..(19): ribonucleotide unmodified or modified as described for this sequence
  misc_feature (21)..(21): 3'-3 attached terminal deoxyabasic moiety
uuguuuuccucuggcucuutt

SEQ ID NO: 3335 - DNA, 21 bp, Artificial sequence
  Description of Artificial Sequence:  siNA antisense region
  misc_feature (1)..(1): 2'-deoxy-2'-fluoro
  misc_feature (4)..(4): 2'-deoxy-2'-fluoro
  misc_feature (7)..(7): 2'-deoxy-2'-fluoro
  misc_feature (10)..(16): 2'-deoxy-2'-fluoro
  misc_feature (18)..(19): 2'-deoxy-2'-fluoro
  misc_feature (1)..(19): ribonucleotide unmodified or modified as described for this sequence
  misc_feature (20)..(20): Phosphorothioate 3'-Internucleotide Linkage
ugauggcaaccucuucauutt

SEQ ID NO: 3336 - DNA, 21 bp, Artificial sequence
  Description of Artificial Sequence:  siNA antisense region
  misc_feature: 2'-deoxy-2'-fluoro
  misc_feature (1)..(1): 2'-deoxy-2'-fluoro
  misc_feature (3)..(7): 2'-deoxy-2'-fluoro
  misc_feature (9)..(9): 2'-deoxy-2'-fluoro
  misc_feature (15)..(15): 2'-deoxy-2'-fluoro
  misc_feature (17)..(17): 2'-deoxy-2'-fluoro
  misc_feature (1)..(19): ribonucleotide unmodified or modified as described for this sequence
  misc_feature (20)..(20): Phosphorothioate 3'-Internucleotide Linkage
cacuccuguggagaugcaatt

SEQ ID NO: 3337 - DNA, 21 bp, Artificial sequence
  Description of Artificial Sequence:  siNA antisense region
  misc_feature (3)..(3): 2'-deoxy-2'-fluoro
  misc_feature (8)..(13): 2'-deoxy-2'-fluoro
  misc_feature (15)..(18): 2'-deoxy-2'-fluoro
  misc_feature (1)..(19): ribonucleotide unmodified or modified as described for this sequence
  misc_feature (20)..(20): Phosphorothioate 3'-Internucleotide Linkage
gguaaagucccuugcuuugtt

SEQ ID NO: 3338 - DNA, 21 bp, Artificial sequence
  Description of Artificial Sequence:  siNA antisense region
  misc_feature (1)..(15): 2'-deoxy-2'-fluoro
  misc_feature (3)..(3): 2'-deoxy-2'-fluoro
  misc_feature (5)..(5): 2'-deoxy-2'-fluoro
  misc_feature (10)..(11): 2'-deoxy-2'-fluoro
  misc_feature (13)..(15): 2'-deoxy-2'-fluoro
  misc_feature (17)..(17): 2'-deoxy-2'-fluoro
  misc_feature (19)..(19): 2'-deoxy-2'-fluoro
  misc_feature (1)..(19): ribonucleotide unmodified or modified as described for this sequence
  misc_feature (20)..(20): Phosphorothioate 3'-Internucleotide Linkage
agcaugaggccauuuacactt

SEQ ID NO: 3339 - DNA, 21 bp, Artificial sequence
  Description of Artificial Sequence:  siNA antisense region
  misc_feature (2)..(2): 2'-deoxy-2'-fluoro
  misc_feature (6)..(6): 2'-deoxy-2'-fluoro
  misc_feature (9)..(9): 2'-deoxy-2'-fluoro
  misc_feature (12)..(12): 2'-deoxy-2'-fluoro
  misc_feature (16)..(16): 2'-deoxy-2'-fluoro
  misc_feature (18)..(18): 2'-deoxy-2'-fluoro
  misc_feature (1)..(19): ribonucleotide unmodified or modified as described for this sequence
  misc_feature (20)..(20): Phosphorothioate 3'-Internucleotide Linkage
guagacagcagcaagcacatt

SEQ ID NO: 3340 - DNA, 21 bp, Artificial sequence
  Description of Artificial Sequence:  siNA antisense region
  misc_feature (2)..(3): 2'-deoxy-2'-fluoro
  misc_feature (5)..(5): 2'-deoxy-2'-fluoro
  misc_feature (8)..(8): 2'-deoxy-2'-fluoro
  misc_feature (10)..(11): 2'-deoxy-2'-fluoro
  misc_feature (14)..(14): 2'-deoxy-2'-fluoro
  misc_feature (17)..(17): 2'-deoxy-2'-fluoro
  misc_feature (1)..(19): ribonucleotide unmodified or modified as described for this sequence
  misc_feature (20)..(20): Phosphorothioate 3'-Internucleotide Linkage
aucacagcaccaaugacaatt

SEQ ID NO: 3341 - DNA, 21 bp, Artificial sequence
  Description of Artificial Sequence:  siNA antisense region
  misc_feature (1)..(3): 2'-deoxy-2'-fluoro
  misc_feature (5)..(9): 2'-deoxy-2'-fluoro
  misc_feature (13)..(14): 2'-deoxy-2'-fluoro
  misc_feature (17)..(19): 2'-deoxy-2'-fluoro
  misc_feature (1)..(19): ribonucleotide unmodified or modified as described for this sequence
  misc_feature (20)..(20): Phosphorothioate 3'-Internucleotide Linkage
uuugcucucaagcugguuctt

SEQ ID NO: 3342 - DNA, 21 bp, Artificial sequence
  Description of Artificial Sequence:  siNA antisense region
  misc_feature (6)..(7): 2'-deoxy-2'-fluoro
  misc_feature (17)..(17): 2'-deoxy-2'-fluoro
  misc_feature (1)..(19): ribonucleotide unmodified or modified as described for this sequence
  misc_feature (20)..(20): Phosphorothioate 3'-Internucleotide Linkage
aagagccagaggaaaacaatt

SEQ ID NO: 3343 - DNA, 21 bp, Artificial sequence
  Description of Artificial Sequence:  siNA sense region
  misc_feature (1)..(2): 2'-deoxy
  misc_feature (1)..(1): 5'-3 attached terminal deoxyabasic moiety
  misc_feature (3)..(3): 2'-deoxy-2'-fluoro
  misc_feature (4)..(10): 2'-deoxy
  misc_feature (11)..(12): 2'-deoxy-2'-fluoro
  misc_feature (13)..(13): 2'-deoxy
  misc_feature (14)..(15): 2'-deoxy-2'-fluoro
  misc_feature (16)..(16): 2'-deoxy
  misc_feature (17)..(18): 2'-deoxy-2'-fluoro
  misc_feature (19)..(19): 2'-deoxy
  misc_feature (1)..(19): ribonucleotide unmodified or modified as described for this sequence
  misc_feature (21)..(21): 3'-3 attached terminal deoxyabasic moiety
aaugaagagguugccaucatt

SEQ ID NO: 3344 - DNA, 21 bp, Artificial sequence
  Description of Artificial Sequence:  siNA sense region
  misc_feature (1)..(2): 2'-deoxy-2'-fluoro
  misc_feature (1)..(1): 5'-3 attached terminal deoxyabasic moiety
  misc_feature (3)..(3): 2'-deoxy
  misc_feature (4)..(4): 2'-deoxy-2'-fluoro
  misc_feature (5)..(5): 2'-deoxy
  misc_feature (6)..(10): 2'-deoxy-2'-fluoro
  misc_feature (11)..(11): 2'-deoxy
  misc_feature (12)..(12): 2'-deoxy-2'-fluoro
  misc_feature (13)..(17): 2'-deoxy
  misc_feature (18)..(18): 2'-deoxy-2'-fluoro
  misc_feature (19)..(19): 2'-deoxy
  misc_feature (1)..(19): ribonucleotide unmodified or modified as described for this sequence
  misc_feature (21)..(21): 3'-3 attached terminal deoxyabasic moiety
uugcaucuccacaggagugtt

SEQ ID NO: 3345 - DNA, 21 bp, Artificial sequence
  Description of Artificial Sequence:  siNA sense region
  misc_feature (1)..(1): 2'-deoxy-2'-fluoro
  misc_feature (1)..(1): 5'-3 attached terminal deoxyabasic moiety
  misc_feature (2)..(5): 2'-deoxy
  misc_feature (6)..(6): 2'-deoxy-2'-fluoro
  misc_feature (7)..(12): 2'-deoxy
  misc_feature (13)..(16): 2'-deoxy-2'-fluoro
  misc_feature (17)..(17): 2'-deoxy
  misc_feature (18)..(19): 2'-deoxy-2'-fluoro
  misc_feature (1)..(19): ribonucleotide unmodified or modified as described for this sequence
  misc_feature (21)..(21): 3'-3 attached terminal deoxyabasic moiety
caaagcaagggacuuuacctt

SEQ ID NO: 3346 - DNA, 21 bp, Artificial sequence
  Description of Artificial Sequence:  siNA sense region
  misc_feature: 2'-deoxy
  misc_feature (1)..(1): 2'-deoxy
  misc_feature (1)..(1): 5'-3 attached terminal deoxyabasic moiety
  misc_feature (2)..(2): 2'-deoxy-2'-fluoro
  misc_feature (3)..(3): 2'-deoxy
  misc_feature (4)..(4): 2'-deoxy-2'-fluoro
  misc_feature (5)..(7): 2'-deoxy
  misc_feature (8)..(8): 2'-deoxy-2'-fluoro
  misc_feature (9)..(10): 2'-deoxy
  misc_feature (11)..(14): 2'-deoxy-2'-fluoro
  misc_feature (15)..(15): 2'-deoxy
  misc_feature (16)..(16): 2'-deoxy-2'-fluoro
  misc_feature (17)..(17): 2'-deoxy
  misc_feature (18)..(19): 2'-deoxy-2'-fluoro
  misc_feature (1)..(19): ribonucleotide unmodified or modified as described for this sequence
  misc_feature (21)..(21): 3'-3 attached terminal deoxyabasic moiety
guguaaauggccucaugcutt

SEQ ID NO: 3347 - DNA, 21 bp, Artificial sequence
  Description of Artificial Sequence:  siNA sense region
  misc_feature (1)..(1): 2'-deoxy-2'-fluoro
  misc_feature (1)..(1): 5'-3 attached terminal deoxyabasic moiety
  misc_feature (2)..(2): 2'-deoxy
  misc_feature (3)..(3): 2'-deoxy-2'-fluoro
  misc_feature (4)..(4): 2'-deoxy
  misc_feature (5)..(7): 2'-deoxy-2'-fluoro
  misc_feature (8)..(8): 2'-deoxy
  misc_feature (9)..(10): 2'-deoxy-2'-fluoro
  misc_feature (11)..(11): 2'-deoxy
  misc_feature (12)..(13): 2'-deoxy-2'-fluoro
  misc_feature (14)..(14): 2'-deoxy
  misc_feature (15)..(17): 2'-deoxy-2'-fluoro
  misc_feature (18)..(18): 2'-deoxy
  misc_feature (19)..(19): 2'-deoxy-2'-fluoro
  misc_feature (1)..(19): ribonucleotide unmodified or modified as described for this sequence
  misc_feature (21)..(21): 3'-3 attached terminal deoxyabasic moiety
ugugcuugcugcugucuactt

SEQ ID NO: 3348 - DNA, 21 bp, Artificial sequence
  Description of Artificial Sequence:  siNA sense region
  misc_feature (1)..(2): 2'-deoxy-2'-fluoro
  misc_feature (1)..(1): 5'-3 attached terminal deoxyabasic moiety
  misc_feature (3)..(3): 2'-deoxy
  misc_feature (4)..(5): 2'-deoxy-2'-fluoro
  misc_feature (6)..(6): 2'-deoxy
  misc_feature (7)..(8): 2'-deoxy-2'-fluoro
  misc_feature (9)..(10): 2'-deoxy
  misc_feature (11)..(11): 2'-deoxy-2'-fluoro
  misc_feature (12)..(12): 2'-deoxy
  misc_feature (13)..(14): 2'-deoxy-2'-fluoro
  misc_feature (15)..(15): 2'-deoxy
  misc_feature (16)..(16): 2'-deoxy-2'-fluoro
  misc_feature (17)..(18): 2'-deoxy
  misc_feature (19)..(19): 2'-deoxy-2'-fluoro
  misc_feature (1)..(19): ribonucleotide unmodified or modified as described for this sequence
  misc_feature (21)..(21): 3'-3 attached terminal deoxyabasic moiety
uugucauuggugcugugautt

SEQ ID NO: 3349 - DNA, 21 bp, Artificial sequence
  Description of Artificial Sequence:  siNA sense region
  misc_feature: 2'-deoxy-2'-fluoro
  misc_feature (1)..(3): 2'-deoxy
  misc_feature (1)..(1): 5'-3 attached terminal deoxyabasic moiety
  misc_feature (4)..(5): 2'-deoxy-2'-fluoro
  misc_feature (6)..(7): 2'-deoxy
  misc_feature (8)..(10): 2'-deoxy-2'-fluoro
  misc_feature (11)..(15): 2'-deoxy
  misc_feature (16)..(16): 2'-deoxy-2'-fluoro
  misc_feature (17)..(19): 2'-deoxy
  misc_feature (1)..(19): ribonucleotide unmodified or modified as described for this sequence
  misc_feature (21)..(21): 3'-3 attached terminal deoxyabasic moiety
gaaccagcuugagagcaaatt

SEQ ID NO: 3350 - DNA, 21 bp, Artificial sequence
  Description of Artificial Sequence:  siNA sense region
  misc_feature: 2'-deoxy
  misc_feature (1)..(2): 2'-deoxy-2'-fluoro
  misc_feature (1)..(1): 5'-3 attached terminal deoxyabasic moiety
  misc_feature (3)..(3): 2'-deoxy
  misc_feature (4)..(12): 2'-deoxy-2'-fluoro
  misc_feature (13)..(14): 2'-deoxy
  misc_feature (15)..(19): 2'-deoxy-2'-fluoro
  misc_feature (1)..(19): ribonucleotide unmodified or modified as described for this sequence
  misc_feature (21)..(21): 3'-3 attached terminal deoxyabasic moiety
uuguuuuccucuggcucuutt

SEQ ID NO: 3351 - DNA, 21 bp, Artificial sequence
  Description of Artificial Sequence:  siNA antisense region
  misc_feature (1)..(1): 2'-deoxy-2'-fluoro
  misc_feature (2)..(3): 2'-deoxy
  misc_feature (4)..(4): 2'-deoxy-2'-fluoro
  misc_feature (5)..(6): 2'-deoxy
  misc_feature (7)..(7): 2'-deoxy-2'-fluoro
  misc_feature (8)..(9): 2'-deoxy
  misc_feature (10)..(16): 2'-deoxy-2'-fluoro
  misc_feature (17)..(17): 2'-deoxy
  misc_feature (18)..(19): 2'-deoxy-2'-fluoro
  misc_feature (1)..(19): ribonucleotide unmodified or modified as described for this sequence
  misc_feature (20)..(20): Phosphorothioate 3'-Internucleotide Linkage
ugauggcaaccucuucauutt

SEQ ID NO: 3352 - DNA, 21 bp, Artificial sequence
  Description of Artificial Sequence:  siNA antisense region
  misc_feature (1)..(1): 2'-deoxy-2'-fluoro
  misc_feature (2)..(2): 2'-deoxy
  misc_feature (3)..(7): 2'-deoxy-2'-fluoro
  misc_feature (8)..(8): 2'-deoxy
  misc_feature (9)..(9): 2'-deoxy-2'-fluoro
  misc_feature (10)..(14): 2'-deoxy
  misc_feature (15)..(15): 2'-deoxy-2'-fluoro
  misc_feature (16)..(16): 2'-deoxy
  misc_feature (17)..(17): 2'-deoxy-2'-fluoro
  misc_feature (18)..(19): 2'-deoxy
  misc_feature (1)..(19): ribonucleotide unmodified or modified as described for this sequence
  misc_feature (20)..(20): Phosphorothioate 3'-Internucleotide Linkage
cacuccuguggagaugcaatt

SEQ ID NO: 3353 - DNA, 21 bp, Artificial sequence
  Description of Artificial Sequence:  siNA antisense region
  misc_feature (1)..(2): 2'-deoxy
  misc_feature (3)..(3): 2'-deoxy-2'-fluoro
  misc_feature (4)..(7): 2'-deoxy
  misc_feature (8)..(13): 2'-deoxy-2'-fluoro
  misc_feature (14)..(14): 2'-deoxy
  misc_feature (15)..(18): 2'-deoxy-2'-fluoro
  misc_feature (19)..(19): 2'-deoxy
  misc_feature (1)..(19): ribonucleotide unmodified or modified as described for this sequence
  misc_feature (20)..(20): Phosphorothioate 3'-Internucleotide Linkage
gguaaagucccuugcuuugtt

SEQ ID NO: 3354 - DNA, 21 bp, Artificial sequence
  Description of Artificial Sequence:  siNA antisense region
  misc_feature (1)..(2): 2'-deoxy
  misc_feature (3)..(3): 2'-deoxy-2'-fluoro
  misc_feature (4)..(4): 2'-deoxy
  misc_feature (5)..(5): 2'-deoxy-2'-fluoro
  misc_feature (6)..(9): 2'-deoxy
  misc_feature (10)..(11): 2'-deoxy-2'-fluoro
  misc_feature (12)..(12): 2'-deoxy
  misc_feature (13)..(15): 2'-deoxy-2'-fluoro
  misc_feature (16)..(16): 2'-deoxy
  misc_feature (17)..(17): 2'-deoxy-2'-fluoro
  misc_feature (18)..(18): 2'-deoxy
  misc_feature (19)..(19): 2'-deoxy-2'-fluoro
  misc_feature (1)..(19): ribonucleotide unmodified or modified as described for this sequence
  misc_feature (20)..(20): Phosphorothioate 3'-Internucleotide Linkage
agcaugaggccauuuacactt

SEQ ID NO: 3355 - DNA, 21 bp, Artificial sequence
  Description of Artificial Sequence:  siNA antisense region
  misc_feature (1)..(1): 2'-deoxy
  misc_feature (2)..(2): 2'-deoxy-2'-fluoro
  misc_feature (3)..(5): 2'-deoxy
  misc_feature (6)..(6): 2'-deoxy-2'-fluoro
  misc_feature (7)..(8): 2'-deoxy
  misc_feature (9)..(9): 2'-deoxy-2'-fluoro
  misc_feature (10)..(11): 2'-deoxy
  misc_feature (12)..(12): 2'-deoxy-2'-fluoro
  misc_feature (13)..(15): 2'-deoxy
  misc_feature (16)..(16): 2'-deoxy-2'-fluoro
  misc_feature (17)..(17): 2'-deoxy
  misc_feature (18)..(18): 2'-deoxy-2'-fluoro
  misc_feature (19)..(19): 2'-deoxy
  misc_feature (1)..(19): ribonucleotide unmodified or modified as described for this sequence
  misc_feature (20)..(20): Phosphorothioate 3'-Internucleotide Linkage
guagacagcagcaagcacatt

SEQ ID NO: 3356 - DNA, 21 bp, Artificial sequence
  Description of Artificial Sequence:  siNA antisense region
  misc_feature (1)..(1): 2'-deoxy
  misc_feature (2)..(3): 2'-deoxy-2'-fluoro
  misc_feature (4)..(4): 2'-deoxy
  misc_feature (5)..(5): 2'-deoxy-2'-fluoro
  misc_feature (6)..(7): 2'-deoxy
  misc_feature (8)..(8): 2'-deoxy-2'-fluoro
  misc_feature (9)..(9): 2'-deoxy
  misc_feature (10)..(11): 2'-deoxy-2'-fluoro
  misc_feature (12)..(13): 2'-deoxy
  misc_feature (14)..(14): 2'-deoxy-2'-fluoro
  misc_feature (15)..(16): 2'-deoxy
  misc_feature (17)..(17): 2'-deoxy-2'-fluoro
  misc_feature (18)..(19): 2'-deoxy
  misc_feature (1)..(19): ribonucleotide unmodified or modified as described for this sequence
  misc_feature (20)..(20): Phosphorothioate 3'-Internucleotide Linkage
aucacagcaccaaugacaatt

SEQ ID NO: 3357 - DNA, 21 bp, Artificial sequence
  Description of Artificial Sequence:  siNA antisense region
  misc_feature (1)..(3): 2'-deoxy-2'-fluoro
  misc_feature (4)..(4): 2'-deoxy
  misc_feature (5)..(9): 2'-deoxy-2'-fluoro
  misc_feature (10)..(12): 2'-deoxy
  misc_feature (13)..(14): 2'-deoxy-2'-fluoro
  misc_feature (15)..(16): 2'-deoxy
  misc_feature (17)..(19): 2'-deoxy-2'-fluoro
  misc_feature (1)..(19): ribonucleotide unmodified or modified as described for this sequence
  misc_feature (20)..(20): Phosphorothioate 3'-Internucleotide Linkage
uuugcucucaagcugguuctt

SEQ ID NO: 3358 - DNA, 21 bp, Artificial sequence
  Description of Artificial Sequence:  siNA antisense region
  misc_feature (1)..(5): 2'-deoxy
  misc_feature (6)..(7): 2'-deoxy-2'-fluoro
  misc_feature (8)..(16): 2'-deoxy
  misc_feature (17)..(17): 2'-deoxy-2'-fluoro
  misc_feature (18)..(19): 2'-deoxy
  misc_feature (1)..(19): ribonucleotide unmodified or modified as described for this sequence
  misc_feature (20)..(20): Phosphorothioate 3'-Internucleotide Linkage
aagagccagaggaaaacaatt

SEQ ID NO: 3359 - DNA, 21 bp, Artificial sequence
  Description of Artificial Sequence:  siNA sense region
  misc_feature (1)..(2): 2'-O-methyl
  misc_feature (3)..(3): 2'-deoxy-2'-fluoro
  misc_feature (4)..(10): 2'-O-methyl
  misc_feature (11)..(12): 2'-deoxy-2'-fluoro
  misc_feature (13)..(13): 2'-O-methyl
  misc_feature (14)..(15): 2'-deoxy-2'-fluoro
  misc_feature (16)..(16): 2'-O-methyl
  misc_feature (17)..(18): 2'-deoxy-2'-fluoro
  misc_feature (19)..(19): 2'-O-methyl
  misc_feature (1)..(19): ribonucleotide unmodified or modified as described for this sequence
  misc_feature (20)..(20): Phosphorothioate 3'-Internucleotide Linkage
aaugaagagguugccaucatt

SEQ ID NO: 3360 - DNA, 21 bp, Artificial sequence
  Description of Artificial Sequence:  siNA sense region
  misc_feature (1)..(2): 2'-deoxy-2'-fluoro
  misc_feature (3)..(3): 2'-O-methyl
  misc_feature (4)..(4): 2'-deoxy-2'-fluoro
  misc_feature (5)..(5): 2'-O-methyl
  misc_feature (6)..(10): 2'-deoxy-2'-fluoro
  misc_feature (11)..(11): 2'-O-methyl
  misc_feature (12)..(12): 2'-deoxy-2'-fluoro
  misc_feature (13)..(17): 2'-O-methyl
  misc_feature (18)..(18): 2'-deoxy-2'-fluoro
  misc_feature (19)..(19): 2'-O-methyl
  misc_feature (1)..(19): ribonucleotide unmodified or modified as described for this sequence
  misc_feature (20)..(20): Phosphorothioate 3'-Internucleotide Linkage
uugcaucuccacaggagugtt

SEQ ID NO: 3361 - DNA, 21 bp, Artificial sequence
  Description of Artificial Sequence:  siNA sense region
  misc_feature (1)..(1): 2'-deoxy-2'-fluoro
  misc_feature (2)..(5): 2'-O-methyl
  misc_feature (6)..(6): 2'-deoxy-2'-fluoro
  misc_feature (7)..(12): 2'-O-methyl
  misc_feature (13)..(16): 2'-deoxy-2'-fluoro
  misc_feature (17)..(17): 2'-O-methyl
  misc_feature (18)..(19): 2'-deoxy-2'-fluoro
  misc_feature (1)..(19): ribonucleotide unmodified or modified as described for this sequence
  misc_feature (20)..(20): Phosphorothioate 3'-Internucleotide Linkage
caaagcaagggacuuuacctt

SEQ ID NO: 3362 - DNA, 21 bp, Artificial sequence
  Description of Artificial Sequence:  siNA sense region
  misc_feature (1)..(1): 2'-O-methyl
  misc_feature (2)..(2): 2'-deoxy-2'-fluoro
  misc_feature (3)..(3): 2'-O-methyl
  misc_feature (4)..(4): 2'-deoxy-2'-fluoro
  misc_feature (5)..(7): 2'-O-methyl
  misc_feature (8)..(8): 2'-deoxy-2'-fluoro
  misc_feature (9)..(10): 2'-O-methyl
  misc_feature (11)..(14): 2'-deoxy-2'-fluoro
  misc_feature (15)..(15): 2'-O-methyl
  misc_feature (16)..(16): 2'-deoxy-2'-fluoro
  misc_feature (17)..(17): 2'-O-methyl
  misc_feature (18)..(19): 2'-deoxy-2'-fluoro
  misc_feature (1)..(19): ribonucleotide unmodified or modified as described for this sequence
  misc_feature (20)..(20): Phosphorothioate 3'-Internucleotide Linkage
guguaaauggccucaugcutt

SEQ ID NO: 3363 - DNA, 21 bp, Artificial sequence
  Description of Artificial Sequence:  siNA sense region
  misc_feature (1)..(1): 2'-deoxy-2'-fluoro
  misc_feature (2)..(2): 2'-O-methyl
  misc_feature (3)..(3): 2'-deoxy-2'-fluoro
  misc_feature (4)..(4): 2'-O-methyl
  misc_feature (5)..(7): 2'-deoxy-2'-fluoro
  misc_feature (8)..(8): 2'-O-methyl
  misc_feature (9)..(10): 2'-deoxy-2'-fluoro
  misc_feature (11)..(11): 2'-O-methyl
  misc_feature (12)..(13): 2'-deoxy-2'-fluoro
  misc_feature (14)..(14): 2'-O-methyl
  misc_feature (15)..(17): 2'-deoxy-2'-fluoro
  misc_feature (18)..(18): 2'-O-methyl
  misc_feature (19)..(19): 2'-deoxy-2'-fluoro
  misc_feature (1)..(19): ribonucleotide unmodified or modified as described for this sequence
  misc_feature (20)..(20): Phosphorothioate 3'-Internucleotide Linkage
ugugcuugcugcugucuactt

SEQ ID NO: 3364 - DNA, 21 bp, Artificial sequence
  Description of Artificial Sequence:  siNA sense region
  misc_feature (1)..(2): 2'-deoxy-2'-fluoro
  misc_feature (3)..(3): 2'-O-methyl
  misc_feature (4)..(5): 2'-deoxy-2'-fluoro
  misc_feature (6)..(6): 2'-O-methyl
  misc_feature (7)..(8): 2'-deoxy-2'-fluoro
  misc_feature (9)..(10): 2'-O-methyl
  misc_feature (11)..(11): 2'-deoxy-2'-fluoro
  misc_feature (12)..(12): 2'-O-methyl
  misc_feature (13)..(14): 2'-deoxy-2'-fluoro
  misc_feature (15)..(15): 2'-O-methyl
  misc_feature (16)..(16): 2'-deoxy-2'-fluoro
  misc_feature (17)..(18): 2'-O-methyl
  misc_feature (19)..(19): 2'-deoxy-2'-fluoro
  misc_feature (1)..(19): ribonucleotide unmodified or modified as described for this sequence
  misc_feature (20)..(20): Phosphorothioate 3'-Internucleotide Linkage
uugucauuggugcugugautt

SEQ ID NO: 3365 - DNA, 21 bp, Artificial sequence
  Description of Artificial Sequence:  siNA sense region
  misc_feature: 2'-deoxy-2'-fluoro
  misc_feature (1)..(3): 2'-O-methyl
  misc_feature (4)..(5): 2'-deoxy-2'-fluoro
  misc_feature (6)..(7): 2'-O-methyl
  misc_feature (8)..(10): 2'-deoxy-2'-fluoro
  misc_feature (11)..(15): 2'-O-methyl
  misc_feature (16)..(16): 2'-deoxy-2'-fluoro
  misc_feature (17)..(19): 2'-O-methyl
  misc_feature (1)..(19): ribonucleotide unmodified or modified as described for this sequence
  misc_feature (20)..(20): Phosphorothioate 3'-Internucleotide Linkage
gaaccagcuugagagcaaatt

SEQ ID NO: 3366 - DNA, 21 bp, Artificial sequence
  Description of Artificial Sequence:  siNA sense region
  misc_feature (1)..(2): 2'-deoxy-2'-fluoro
  misc_feature (3)..(3): 2'-O-methyl
  misc_feature (4)..(12): 2'-deoxy-2'-fluoro
  misc_feature (13)..(14): 2'-O-methyl
  misc_feature (15)..(19): 2'-deoxy-2'-fluoro
  misc_feature (1)..(19): ribonucleotide unmodified or modified as described for this sequence
  misc_feature (20)..(20): Phosphorothioate 3'-Internucleotide Linkage
uuguuuuccucuggcucuutt

SEQ ID NO: 3367 - DNA, 21 bp, Artificial sequence
  Description of Artificial Sequence:  siNA antisense region
  misc_feature (1)..(1): 2'-deoxy-2'-fluoro
  misc_feature (2)..(3): 2'-O-methyl
  misc_feature (4)..(4): 2'-deoxy-2'-fluoro
  misc_feature (5)..(6): 2'-O-methyl
  misc_feature (7)..(7): 2'-deoxy-2'-fluoro
  misc_feature (8)..(9): 2'-O-methyl
  misc_feature (10)..(16): 2'-deoxy-2'-fluoro
  misc_feature (17)..(17): 2'-O-methyl
  misc_feature (18)..(19): 2'-deoxy-2'-fluoro
  misc_feature (1)..(19): ribonucleotide unmodified or modified as described for this sequence
  misc_feature (20)..(20): Phosphorothioate 3'-Internucleotide Linkage
ugauggcaaccucuucauutt

SEQ ID NO: 3368 - DNA, 21 bp, Artificial sequence
  Description of Artificial Sequence:  siNA antisense region
  misc_feature (1)..(1): 2'-deoxy-2'-fluoro
  misc_feature (2)..(2): 2'-O-methyl
  misc_feature (2)..(6): 2'-deoxy-2'-fluoro
  misc_feature (3)..(7): 2'-deoxy-2'-fluoro
  misc_feature (8)..(8): 2'-O-methyl
  misc_feature (9)..(9): 2'-deoxy-2'-fluoro
  misc_feature (10)..(14): 2'-O-methyl
  misc_feature (15)..(15): 2'-deoxy-2'-fluoro
  misc_feature (16)..(16): 2'-O-methyl
  misc_feature (17)..(17): 2'-deoxy-2'-fluoro
  misc_feature (18)..(19): 2'-O-methyl
  misc_feature (1)..(19): ribonucleotide unmodified or modified as described for this sequence
  misc_feature (20)..(20): Phosphorothioate 3'-Internucleotide Linkage
cacuccuguggagaugcaatt

SEQ ID NO: 3369 - DNA, 21 bp, Artificial sequence
  Description of Artificial Sequence:  siNA antisense region
  misc_feature (1)..(2): 2'-O-methyl
  misc_feature (3)..(3): 2'-deoxy-2'-fluoro
  misc_feature (4)..(7): 2'-O-methyl
  misc_feature (8)..(13): 2'-deoxy-2'-fluoro
  misc_feature (14)..(14): 2'-O-methyl
  misc_feature (15)..(18): 2'-deoxy-2'-fluoro
  misc_feature (19)..(19): 2'-O-methyl
  misc_feature (1)..(19): ribonucleotide unmodified or modified as described for this sequence
  misc_feature (20)..(20): Phosphorothioate 3'-Internucleotide Linkage
gguaaagucccuugcuuugtt

SEQ ID NO: 3370 - DNA, 21 bp, Artificial sequence
  Description of Artificial Sequence:  siNA antisense region
  misc_feature (1)..(2): 2'-O-methyl
  misc_feature (3)..(3): 2'-deoxy-2'-fluoro
  misc_feature (4)..(4): 2'-O-methyl
  misc_feature (5)..(5): 2'-deoxy-2'-fluoro
  misc_feature (6)..(9): 2'-O-methyl
  misc_feature (10)..(11): 2'-deoxy-2'-fluoro
  misc_feature (12)..(12): 2'-O-methyl
  misc_feature (13)..(15): 2'-deoxy-2'-fluoro
  misc_feature (16)..(16): 2'-O-methyl
  misc_feature (17)..(17): 2'-deoxy-2'-fluoro
  misc_feature (18)..(18): 2'-O-methyl
  misc_feature (19)..(19): 2'-deoxy-2'-fluoro
  misc_feature (1)..(19): ribonucleotide unmodified or modified as described for this sequence
  misc_feature (20)..(20): Phosphorothioate 3'-Internucleotide Linkage
agcaugaggccauuuacactt

SEQ ID NO: 3371 - DNA, 21 bp, Artificial sequence
  Description of Artificial Sequence:  siNA antisense region
  misc_feature (1)..(1): 2'-O-methyl
  misc_feature (2)..(2): 2'-deoxy-2'-fluoro
  misc_feature (3)..(5): 2'-O-methyl
  misc_feature (6)..(6): 2'-deoxy-2'-fluoro
  misc_feature (7)..(8): 2'-O-methyl
  misc_feature (9)..(9): 2'-deoxy-2'-fluoro
  misc_feature (10)..(11): 2'-O-methyl
  misc_feature (12)..(12): 2'-deoxy-2'-fluoro
  misc_feature (13)..(15): 2'-O-methyl
  misc_feature (16)..(16): 2'-deoxy-2'-fluoro
  misc_feature (17)..(17): 2'-O-methyl
  misc_feature (18)..(18): 2'-deoxy-2'-fluoro
  misc_feature (19)..(19): 2'-O-methyl
  misc_feature (1)..(19): ribonucleotide unmodified or modified as described for this sequence
  misc_feature (20)..(20): Phosphorothioate 3'-Internucleotide Linkage
guagacagcagcaagcacatt

SEQ ID NO: 3372 - DNA, 21 bp, Artificial sequence
  Description of Artificial Sequence:  siNA antisense region
  misc_feature (1)..(1): 2'-O-methyl
  misc_feature (2)..(3): 2'-deoxy-2'-fluoro
  misc_feature (4)..(4): 2'-O-methyl
  misc_feature (5)..(5): 2'-deoxy-2'-fluoro
  misc_feature (6)..(7): 2'-O-methyl
  misc_feature (8)..(8): 2'-deoxy-2'-fluoro
  misc_feature (9)..(9): 2'-O-methyl
  misc_feature (10)..(11): 2'-deoxy-2'-fluoro
  misc_feature (12)..(13): 2'-O-methyl
  misc_feature (14)..(14): 2'-deoxy-2'-fluoro
  misc_feature (15)..(16): 2'-O-methyl
  misc_feature (17)..(17): 2'-deoxy-2'-fluoro
  misc_feature (18)..(19): 2'-O-methyl
  misc_feature (1)..(19): ribonucleotide unmodified or modified as described for this sequence
  misc_feature (20)..(20): Phosphorothioate 3'-Internucleotide Linkage
aucacagcaccaaugacaatt

SEQ ID NO: 3373 - DNA, 21 bp, Artificial sequence
  Description of Artificial Sequence:  siNA antisense region
  misc_feature (1)..(3): 2'-deoxy-2'-fluoro
  misc_feature (4)..(4): 2'-O-methyl
  misc_feature (5)..(9): 2'-deoxy-2'-fluoro
  misc_feature (10)..(12): 2'-O-methyl
  misc_feature (13)..(14): 2'-deoxy-2'-fluoro
  misc_feature (15)..(16): 2'-O-methyl
  misc_feature (17)..(19): 2'-deoxy-2'-fluoro
  misc_feature (1)..(19): ribonucleotide unmodified or modified as described for this sequence
  misc_feature (20)..(20): Phosphorothioate 3'-Internucleotide Linkage
uuugcucucaagcugguuctt

SEQ ID NO: 3374 - DNA, 21 bp, Artificial sequence
  Description of Artificial Sequence:  siNA antisense region
  misc_feature (1)..(5): 2'-O-methyl
  misc_feature (6)..(7): 2'-deoxy-2'-fluoro
  misc_feature (8)..(16): 2'-O-methyl
  misc_feature (17)..(17): 2'-deoxy-2'-fluoro
  misc_feature (18)..(19): 2'-O-methyl
  misc_feature (1)..(19): ribonucleotide unmodified or modified as described for this sequence
  misc_feature (20)..(20): Phosphorothioate 3'-Internucleotide Linkage
aagagccagaggaaaacaatt

SEQ ID NO: 3375 - DNA, 21 bp, Artificial Sequence
  Description of Artificial Sequence:  siNA sense region
  misc_feature (1)..(1): 5'-3 attached terminal deoxyabasic moiety
  misc_feature (1)..(19): ribonucleotide unmodified or modified as described for this sequence
  misc_feature (21)..(21): 3'-3 attached terminal deoxyabasic moiety
  misc_feature (20)..(21): n stands for any nucleotide
nnnnnnnnnnnnnnnnnnnnn

SEQ ID NO: 3376 - DNA, 21 bp, Artificial Sequence
  Description of Artificial Sequence:  siNA antisense region
  misc_feature (1)..(19): ribonucleotide unmodified or modified as described for this sequence
  misc_feature (20)..(20): Phosphorothioate 3'-Internucleotide Linkage
  misc_feature (20)..(21): n stands for any nucleotide
  misc_feature (21)..(21): attached terminal glyceryl moiety
nnnnnnnnnnnnnnnnnnnnn

SEQ ID NO: 3377 - DNA, 21 bp, Artificial Sequence
  Description of Artificial Sequence:  siNA sense region
  misc_feature (1)..(19): n stands for any ribonucleotide wherein any pyrimidine nucleotide present is 2'-Fluoro and all purine nucleotide is 2'-o-methyl
  misc_feature (20)..(20): Phosphorothioate 3'-Internucleotide Linkage
  misc_feature (20)..(21): n stands for any nucleotide
nnnnnnnnnnnnnnnnnnnnn

SEQ ID NO: 3378 - DNA, 21 bp, Artificial Sequence
  Description of Artificial Sequence:  siNA antisense region
  misc_feature (1)..(19): n stands for any ribonucleotide wherein any pyrimidine nucleotide present is 2'-Fluoro and all purine nucleotides are 2'-o-methyl
  misc_feature (20)..(20): Phosphorothioate 3'-Internucleotide Linkage
  misc_feature (20)..(21): n stands for any nucleotide
  misc_feature (21)..(21): attached terminal glyceryl moiety
nnnnnnnnnnnnnnnnnnnnn

SEQ ID NO: 3379 - DNA, 21 bp, Artificial Sequence
  Description of Artificial Sequence:  siNA sense region
  misc_feature (1)..(19): n stands for any ribonucleotide wherein any pyrimidine nucleotide present is 2'-O-methyl or 2'-Fluoro
  misc_feature (20)..(21): n stands for any nucleotide
  misc_feature (1)..(1): 5'-3 attached terminal deoxyabasic moiety
  misc_feature (21)..(21): 3'-3 attached terminal deoxyabasic moiety
nnnnnnnnnnnnnnnnnnnnn

SEQ ID NO: 3380 - DNA, 21 bp, Artificial Sequence
  Description of Artificial Sequence:  siNA antisense region
  misc_feature (1)..(19): n stands for any ribonucleotide wherein any pyrimidine nucleotide present is 2'-Fluoro
  misc_feature (20)..(20): Phosphorothioate 3'-Internucleotide Linkage
  misc_feature (20)..(21): n stands for any nucleotide
  misc_feature (21)..(21): attached terminal glyceryl moiety
nnnnnnnnnnnnnnnnnnnnn

SEQ ID NO: 3381 - DNA, 21 bp, Artificial Sequence
  Description of Artificial Sequence:  siNA sense region
  misc_feature (1)..(19): n stands for any ribonucleotide wherein any pyrimidine nucleotide present is 2'-Fluoro and any purine nucleotide present is 2'-Deoxy
  misc_feature (20)..(21): n stands for any nucleotide
  misc_feature (1)..(1): 5'-3 attached terminal deoxyabasic moiety
  misc_feature (21)..(21): 3'-3 attached terminal deoxyabasic moiety
nnnnnnnnnnnnnnnnnnnnn

SEQ ID NO: 3382 - DNA, 21 bp, Artificial Sequence
  Description of Artificial Sequence:  siNA sense region
  misc_feature (1)..(19): n stands for any ribonucleotide wherein any pyrimidine nucleotide present is 2'-Fluoro
  misc_feature (20)..(21): n stands for any nucleotide
  misc_feature (1)..(1): 5'-3 attached terminal deoxyabasic moiety
  misc_feature (21)..(21): 3'-3 attached terminal deoxyabasic moiety
nnnnnnnnnnnnnnnnnnnnn

SEQ ID NO: 3383 - DNA, 21 bp, Artificial Sequence
  Description of Artificial Sequence:  siNA antisense region
  misc_feature (1)..(19): n stands for any ribonucleotide wherein any pyrimidine nucleotide present is 2'-Fluoro and any purine nucleotide present is 2'-deoxy
  misc_feature (20)..(21): n stands for any nucleotide
  misc_feature (20)..(20): Phosphorothioate or Phosphorodithioate 3'-Internucleotide Linkage
  misc_feature (21)..(21): attached terminal glyceryl moiety
nnnnnnnnnnnnnnnnnnnnn

SEQ ID NO: 3384 - DNA, 21 bp, Artificial Sequence
  Description of Artificial Sequence:  siNA sense region
  misc_feature (1)..(1): 5'-3 attached terminal deoxyabasic moiety
  misc_feature (21)..(21): 3'-3 attached terminal deoxyabasic moiety
  misc_feature (1)..(19): ribonucleotide unmodified or modified as described for this sequence
augugcuugaagauccuugtt

SEQ ID NO: 3385 - DNA, 21 bp, Artificial Sequence
  Description of Artificial Sequence:  siNA antisense region
  misc_feature (20)..(20): Phosphorothioate or Phosphorodithioate 3'-Internucleotide Linkage
  misc_feature (1)..(19): ribonucleotide unmodified or modified as described for this sequence
  misc_feature (21)..(21): attached terminal glyceryl moiety
caaggaucuucaagcacautt

SEQ ID NO: 3386 - DNA, 21 bp, Artificial Sequence
  Description of Artificial Sequence:  siNA sense region
  misc_feature (1)..(2): 2'-O-Methyl
  misc_feature (3)..(3): 2'-O-Methyl
  misc_feature (5)..(5): 2'-O-Methyl
  misc_feature (9)..(13): 2'-O-Methyl
  misc_feature (19)..(19): 2'-O-Methyl
  misc_feature (2)..(2): 2'-deoxy-2'-Fluoro
  misc_feature (4)..(4): 2'-deoxy-2'-Fluoro
  misc_feature (6)..(8): 2'-deoxy-2'-Fluoro
  misc_feature (14)..(18): 2'-deoxy-2'-Fluoro
  misc_feature (1)..(19): ribonucleotide unmodified or modified as described for this sequence
augugcuugaagauccuugtt

SEQ ID NO: 3387 - DNA, 21 bp, Artificial Sequence
  Description of Artificial Sequence:  siNA antisense region
  misc_feature (2)..(6): 2'-O-Methyl
  misc_feature (12)..(14): 2'-O-Methyl
  misc_feature (16)..(16): 2'-O-Methyl
  misc_feature (18)..(18): 2'-O-Methyl
  misc_feature (1)..(1): 2'-deoxy-2'-Fluoro
  misc_feature (7)..(11): 2'-deoxy-2'-Fluoro
  misc_feature (15)..(15): 2'-deoxy-2'-Fluoro
  misc_feature (17)..(17): 2'-deoxy-2'-Fluoro
  misc_feature (19)..(19): 2'-deoxy-2'-Fluoro
  misc_feature (1)..(19): ribonucleotide unmodified or modified as described for this sequence
  misc_feature (20)..(20): Phosphorothioate or Phosphorodithioate 3'-Internucleotide Linkage
  misc_feature (21)..(21): attached terminal glyceryl moiety
caaggaucuucaagcacautt

SEQ ID NO: 3388 - DNA, 21 bp, Artificial Sequence
  Description of Artificial Sequence:  siNA sense region
  misc_feature (2)..(2): 2'-deoxy-2'-Fluoro
  misc_feature (4)..(4): 2'-deoxy-2'-Fluoro
  misc_feature (6)..(8): 2'-deoxy-2'-Fluoro
  misc_feature (14)..(18): 2'-deoxy-2'-Fluoro
  misc_feature (1)..(1): 5'-3 attached terminal deoxyabasic moiety
  misc_feature (21)..(21): 3'-3 attached terminal deoxyabasic moiety
  misc_feature (1)..(19): ribonucleotide unmodified or modified as described for this sequence
augugcuugaagauccuugtt

SEQ ID NO: 3389 - DNA, 21 bp, Artificial Sequence
  Description of Artificial Sequence:  siNA antisense region
  misc_feature (1)..(1): 2'-deoxy-2'-Fluoro
  misc_feature (7)..(11): 2'-deoxy-2'-Fluoro
  misc_feature (15)..(15): 2'-deoxy-2'-Fluoro
  misc_feature (17)..(17): 2'-deoxy-2'-Fluoro
  misc_feature (19)..(19): 2'-deoxy-2'-Fluoro
  misc_feature (1)..(19): ribonucleotide unmodified or modified as described for this sequence
  misc_feature (20)..(20): Phosphorothioate or Phosphorodithioate 3'-Internucleotide Linkage
  misc_feature (21)..(21): attached terminal glyceryl moiety
caaggaucuucaagcacautt

SEQ ID NO: 3390 - DNA, 21 bp, Artificial Sequence
  Description of Artificial Sequence:  siNA sense region
  misc_feature (2)..(2): 2'-deoxy-2'-Fluoro
  misc_feature (4)..(4): 2'-deoxy-2'-Fluoro
  misc_feature (6)..(8): 2'-deoxy-2'-Fluoro
  misc_feature (14)..(18): 2'-deoxy-2'-Fluoro
  misc_feature (1)..(1): 5'-3 attached terminal deoxyabasic moiety
  misc_feature (21)..(21): 3'-3 attached terminal deoxyabasic moiety
  misc_feature (1)..(19): ribonucleotide unmodified or modified as described for this sequence
augugcuugaagauccuugtt

SEQ ID NO: 3391 - DNA, 21 bp, Artificial Sequence
  Description of Artificial Sequence:  siNA sense region
  misc_feature (2)..(2): 2'-deoxy-2'-Fluoro
  misc_feature (4)..(4): 2'-deoxy-2'-Fluoro
  misc_feature (6)..(8): 2'-deoxy-2'-Fluoro
  misc_feature (14)..(18): 2'-deoxy-2'-Fluoro
  misc_feature (1)..(1): attached terminal glyceryl moiety
  misc_feature (21)..(21): attached terminal glyceryl moiety
  misc_feature (1)..(19): ribonucleotide unmodified or modified as described for this sequence
augugcuugaagauccuugtt

SEQ ID NO: 3392 - DNA, 21 bp, Artificial Sequence
  Description of Artificial Sequence:  siNA antisense region
  misc_feature (1)..(1): 2'-deoxy-2'-Fluoro
  misc_feature (7)..(11): 2'-deoxy-2'-Fluoro
  misc_feature (15)..(15): 2'-deoxy-2'-Fluoro
  misc_feature (17)..(17): 2'-deoxy-2'-Fluoro
  misc_feature (19)..(19): 2'-deoxy-2'-Fluoro
  misc_feature (1)..(19): ribonucleotide unmodified or modified as described for this sequence
  misc_feature (20)..(20): Phosphorothioate or Phosphorodithioate 3'-Internucleotide Linkage
  misc_feature (21)..(21): attached terminal glyceryl moiety
caaggaucuucaagcacautt

What we claim is:

1. A chemically synthesized double stranded short interfering nucleic acid (siNA) molecule that directs cleavage of a severe acute respiratory syndrome (SARS) virus RNA via RNA interference, wherein:
a. each strand of said siNA molecule is about 19 to about 23 nucleotides in length;
b. one strand of said siNA molecule comprises nucleotide sequence having sufficient complementarity to said SARS virus RNA for the siNA molecule to direct cleavage of the SARS virus RNA via RNA interference; and
c. said siNA molecule does not require the presence of nucleotides having a 2′-hydroxy group for mediating RNA interference.

2. The siNA molecule of claim 1, wherein said siNA molecule comprises no ribonucleotides.

3. The siNA molecule of claim 1, wherein said siNA molecule comprises ribonucleotides.

4. The siNA molecule of claim 1, wherein one strand of said double-stranded siNA molecule comprises a nucleotide sequence that is complementary to a nucleotide sequence of a SARS virus gene or a portion thereof, and wherein a second strand of said double-stranded siNA molecule comprises a nucleotide sequence substantially similar to the nucleotide sequence or a portion thereof of said SARS virus RNA.

5. The siNA molecule of claim 4, wherein each strand of the siNA molecule comprises about 19 to about 23 nucleotides, and wherein each strand comprises at least about 19 nucleotides that are complementary to the nucleotides of the other strand.

6. The siNA molecule of claim 1, wherein said siNA molecule comprises an antisense region comprising a nucleotide sequence that is complementary to a nucleotide sequence of a SARS virus gene or a portion thereof, and wherein said siNA further comprises a sense region, wherein said sense region comprises a nucleotide sequence substantially similar to the nucleotide sequence of said SARS virus gene or a portion thereof.

7. The siNA molecule of claim 6, wherein said antisense region and said sense region comprises about 19 to about 23 nucleotides, and wherein said antisense region comprises at least about 19 nucleotides that are complementary to nucleotides of the sense region.

8. The siNA molecule of claim 1, wherein said siNA molecule comprises a sense region and an antisense region, and wherein said antisense region comprises a nucleotide sequence that is complementary to a nucleotide sequence of RNA encoded by a SARS virus gene, or a portion thereof, and said sense region comprises a nucleotide sequence that is complementary to said antisense region.

9. The siNA molecule of claim 6, wherein said siNA molecule is assembled from two separate oligonucleotide fragments wherein one fragment comprises the sense region and a second fragment comprises the antisense region of said siNA molecule.

10. The siNA molecule of claim 6, wherein said sense region is connected to the antisense region via a linker molecule.

11. The siNA molecule of claim 10, wherein said linker molecule is a polynucleotide linker.

12. The siNA molecule of claim 10, wherein said linker molecule is a non-nucleotide linker.

13. The siNA molecule of claim 6, wherein pyrimidine nucleotides in the sense region are 2′-O-methylpyrimidine nucleotides.

14. The siNA molecule of claim 6, wherein purine nucleotides in the sense region are 2′-deoxy purine nucleotides.

15. The siNA molecule of claim 6, wherein pyrimidine nucleotides present in the sense region are 2′-deoxy-2′-fluoro pyrimidine nucleotides.

16. The siNA molecule of claim 9, wherein the fragment comprising said sense region includes a terminal cap moiety at the 5′-end, the 3′-end, or both of the 5′ and 3′ ends of the fragment comprising said sense region.

17. The siNA molecule of claim 16, wherein said terminal cap moiety is an inverted deoxy abasic moiety.

18. The siNA molecule of claim 6, wherein pyrimidine nucleotides of said antisense region are 2′-deoxy-2′-fluoro pyrimidine nucleotides

19. The siNA molecule of claim 6, wherein purine nucleotides of said antisense region are 2′-O-methyl purine nucleotides.

20. The siNA molecule of claim 6, wherein purine nucleotides present in said antisense region comprise 2′-deoxy-purine nucleotides.

21. The siNA molecule of claim 18, wherein said antisense region comprises a phosphorothioate internucleotide linkage at the 3′ end of said antisense region.

22. The siNA molecule of claim 6, wherein said antisense region comprises a glyceryl modification at the 3′ end of said antisense region.

23. The siNA molecule of claim 9, wherein each of the two fragments of said siNA molecule comprise 21 nucleotides.

24. The siNA molecule of claim 23, wherein about 19 nucleotides of each fragment of the siNA molecule are base-paired to the complementary nucleotides of the other fragment of the siNA molecule and wherein at least two 3′ terminal nucleotides of each fragment of the siNA molecule are not base-paired to the nucleotides of the other fragment of the siNA molecule.

25. The siNA molecule of claim 24, wherein each of the two 3′ terminal nucleotides of each fragment of the siNA molecule are 2′-deoxy-pyrimidines.

26. The siNA molecule of claim 25, wherein said 2′-deoxy-pyrimidine is 2′-deoxy-thymidine.

27. The siNA molecule of claim 23, wherein all 21 nucleotides of each fragment of the siNA molecule are base-paired to the complementary nucleotides of the other fragment of the siNA molecule.

28. The siNA molecule of claim 23, wherein about 19 nucleotides of the antisense region are base-paired to the nucleotide sequence of the RNA encoded by a SARS virus gene or a portion thereof.

29. The siNA molecule of claim 23, wherein 21 nucleotides of the antisense region are base-paired to the nucleotide sequence of the RNA encoded by a SARS virus gene or a portion thereof.

30. The siNA molecule of claim 9, wherein the 5′-end of the fragment comprising said antisense region optionally includes a phosphate group.

31. A pharmaceutical composition comprising the siNA molecule of claim 1 in an acceptable carrier or diluent.
